(19) United States
(12) Patent Application Publication
(10) Pub. No.: US 2026/0132408 A1
(43) Pub. Date: May 14, 2026

(54) COMPOSITIONS AND METHODS FOR TRANSGENE EXPRESSION FROM AN ALBUMIN LOCUS

(71) Applicants: Intellia Therapeutics, Inc., Cambridge, MA (US); Regeneron Pharmaceutics, Inc., Tarrytown, NY (US)

(72) Inventors: Jonathan Douglas Finn, Cambridge, MA (US); Hon-Ren Huang, Cambridge, MA (US); Moitri Roy, Cambridge, MA (US); KehDih Lai, Tarrytown, NY (US); Rachel Sattler, Tarrytown, NY (US); Christos Kyratsous, Tarrytown, NY (US); Cheng Wang, Tarrytown, NY (US)

(21) Appl. No.: 19/174,328

(22) Filed: Apr. 9, 2025

Related U.S. Application Data
(63) Continuation of application No. 17/233,373, filed on Apr. 16, 2021, now abandoned.
Application No. 17/233,373 is a continuation of application No. PCT/US19/57086, filed on Oct. 18, 2019.
(60) Provisional application No. 62/747,402, filed on Oct. 18, 2018.
(60) Provisional application No. 62/840,346, filed on Apr. 29, 2019.

(51) Int. Cl. C12N 15/62; A61K 48/00; C12N 9/22; C12N 15/11; C12N 15/113; C12N 15/86

(52) U.S. Cl. CPC C12N 15/62; A61K 48/0041; A61K 48/005; C12N 9/22; C12N 15/11; C12N 15/113; C12N 15/86; C12N 2310/20; C12N 2750/14143; C12N 2800/80

(57) ABSTRACT

The present disclosure is directed to methods and compositions useful for inserting and expressing a heterologous (exogenous) gene within a genomic locus, such as a safe harbor site, of a host cell.

### CROSS-REFERENCE TO RELATED APPLICATIONS

[0001] This application is a Continuation of U.S. patent application Ser. No. 17/233,373, filed on Apr. 16, 2021, which is a Continuation of International Patent Application No. PCT/US19/57086, filed on Oct. 18, 2019, which claims the benefit of U.S. Provisional Application 62/747,402, filed on Oct. 18, 2018, and U.S. Provisional Application 62/840,346, filed on Apr. 29, 2019. The entire content of each of the foregoing applications is incorporated herein by reference in its entirety.

### INCORPORATION BY REFERENCE OF SEQUENCE LISTING

[0002] The application contains a Sequence Listing which has been submitted electronically in .XML format and is hereby incorporated by reference in its entirety. Said .XML copy, created on Jul. 23, 2025, is named ILH-02103.xml and is 2,927,064 bytes in size. The sequence listing contained in this .XML file is part of the specification and is hereby incorporated by reference herein in its entirety.

[0003] Genome editing in gene therapy approaches arises from the idea that the exogenous introduction of the missing or otherwise compromised genetic material can correct a genetic disease. Gene therapy has long been recognized for its enormous potential in how practitioners approach and treat human diseases. Instead of relying on drugs or surgery, patients with underlying genetic factors can be treated by directly targeting the underlying cause. Furthermore, by targeting the underlying genetic cause, gene therapy can provide the potential to effectively cure patients. However, clinical applications of gene therapy approaches still require improvement in several aspects.

[0004] Provided herein are compositions and methods useful for inserting and expressing a heterologous (exogenous) gene within a genomic locus, such as a safe harbor site, of a host cell. Several safe harbor loci have been described, including CCR5, HPRT, AAVS1, Rosa and albumin. As described herein, targeting and inserting an exogenous gene at the albumin locus (e.g., at intron 1) allows the use of albumin's endogenous promoter to drive robust expression of the exogenous gene. The present disclosure is based, in part, on the identification of guide RNAs that specifically target sites within the albumin gene, e.g., intron 1 of the albumin gene, and which provide efficient insertion and/or expression of an exogenous gene. The following embodiments are provided.

[0005] In one aspect, the present disclosure provides a method of inserting a nucleic acid encoding a heterologous polypeptide into an albumin locus of a host cell or cell population, comprising administering: i) a gRNA that comprises a sequence chosen from: a) a sequence that is at least 95%, 90%, 85%, 80%, or 75% identical to a sequence selected from the group consisting of SEQ ID Nos: 2, 8, 13, 19, 28, 29, 31, 32, 33; b) at least 17, 18, 19, or 20 contiguous nucleotides of a sequence selected from the group consisting of SEQ ID NOs: 2, 8, 13, 19, 28, 29, 31, 32, 33; c) a sequence selected from the group consisting of SEQ ID NOs: 34, 40, 45, 51, 60, 61, 63, 64, 65, 66, 72, 77, 83, 92, 93, 95, 96, and 97; d) a sequence that is at least 95%, 90%, 85%, 80%, or 75% identical to a sequence selected from the group consisting of SEQ ID NOs: 2-33; e) at least 17, 18, 19, or 20 contiguous nucleotides of a sequence selected from the group consisting of SEQ ID NOs: 2-33; f) a sequence selected from the group consisting of SEQ ID NOs: 34-97; g) a sequence that is complementary to 15 consecutive nucleotides +/−10 nucleotides of the genomic coordinates listed for SEQ ID NOs: 2-33; h) a sequence that is at least 95%, 90%, 85%, 80%, or 75% identical to a sequence selected from the group consisting of SEQ ID NOs: 98-119; i) at least 17, 18, 19, or contiguous nucleotides of a sequence selected from the group consisting of SEQ ID NOS: 98-119; and j) a sequence selected from the group consisting of SEQ ID NOs: 120-163; ii) an RNA-guided DNA binding agent; and iii) a construct comprising a nucleic acid encoding the heterologous polypeptide, thereby inserting the nucleic acid encoding the heterologous polypeptide into an albumin locus of the host cell or cell population.

[0006] In another aspect, the present disclosure provides a method of expressing a heterologous polypeptide from an albumin locus of a host cell or cell population, comprising administering: i) a gRNA that comprises a sequence chosen from: a) a sequence that is at least 95%, 90%, 85%, 80%, or 75% identical to a sequence selected from the group consisting of SEQ ID Nos: 2, 8, 13, 19, 28, 29, 31, 32, 33; b) at least 17, 18, 19, or 20 contiguous nucleotides of a sequence selected from the group consisting of SEQ ID NOs: 2, 8, 13, 19, 28, 29, 31, 32, 33; c) a sequence selected from the group consisting of SEQ ID NOs: 34, 40, 45, 51, 60, 61, 63, 64, 65, 66, 72, 77, 83, 92, 93, 95, 96, and 97; d) a sequence that is at least 95%, 90%, 85%, 80%, or 75% identical to a sequence selected from the group consisting of SEQ ID NOs: 2-33; e) at least 17, 18, 19, or 20 contiguous nucleotides of a sequence selected from the group consisting of SEQ ID NOs: 2-33; f) a sequence selected from the group consisting of SEQ ID NOs: 34-97; and g) a sequence that comprises 15 consecutive nucleotides +/−10 nucleotides of the genomic coordinates listed for SEQ ID NOs: 2-33; ii) an RNA-guided DNA binding agent; and iii) a construct comprising a coding sequence for the heterologous polypeptide, thereby expressing the heterologous polypeptide in the host cell or cell population.

[0007] In another aspect, the present disclosure provides a method of expressing a therapeutic agent in a non-dividing cell type or cell population, comprising administering: i) a gRNA that comprises a sequence chosen from: a) a sequence that is at least 95%, 90%, 85%, 80%, or 75% identical to a sequence selected from the group consisting of SEQ ID Nos: 2, 8, 13, 19, 28, 29, 31, 32, 33; b) at least 17, 18, 19, or 20 contiguous nucleotides of a sequence selected from the group consisting of SEQ ID NOs: 2, 8, 13, 19, 28, 29, 31, 32, 33; c) a sequence selected from the group consisting of SEQ ID NOs: 34, 40, 45, 51, 60, 61, 63, 64, 65, 66, 72, 77, 83, 92, 93, 95, 96, and 97; d) a sequence that is at least 95%, 90%, 85%, 80%, or 75% identical to a sequence selected from the group consisting of SEQ ID NOs: 2-33; e) at least 17, 18, 19, or 20 contiguous nucleotides of a sequence selected from the group consisting of SEQ ID NOs: 2-33; f) a sequence selected from the group consisting of SEQ ID NOs: 34-97; and g) a sequence that comprises 15 consecutive nucleotides +/−10 nucleotides of the genomic coordinates listed for SEQ ID NOs: 2-33; ii) an RNA-guided DNA binding agent; and iii) a construct comprising a coding sequence for a heterologous polypeptide, thereby expressing the therapeutic agent in the non-dividing cell type or cell population.

[0008] In some embodiments, the gRNA comprises a guide sequence selected from the group consisting of SEQ ID NO: 2, SEQ ID NO: 3, SEQ ID NO: 4, SEQ ID NO: 5, SEQ ID NO: 6, SEQ ID NO: 7, SEQ ID NO: 8, SEQ ID NO: 9, SEQ ID NO: 10, SEQ ID NO: 11, SEQ ID NO: 12, SEQ ID NO: 13, SEQ ID NO: 14, SEQ ID NO: 15, SEQ ID NO: 16, SEQ ID NO: 17, SEQ ID NO: 18, SEQ ID NO: 19, SEQ ID NO: 20, SEQ ID NO: 21, SEQ ID NO: 22, SEQ ID NO: 23, SEQ ID NO: 24, SEQ ID NO: 25, SEQ ID NO: 26, SEQ ID NO: 27, SEQ ID NO: 28, SEQ ID NO: 29, SEQ ID NO: 30, SEQ ID NO: 31, SEQ ID NO: 32, and SEQ ID NO: 33.

[0009] In some embodiments, the method is performed in vivo. In some embodiments, the method is performed in vitro.

[0010] In some embodiments, the gRNA binds a region upstream of a protospacer adjacent motif (PAM). In some embodiments, the PAM is chosen from NGG, NNGRRT, NNGRR(N), NNAGAAW, NNNNG(A/C)TT, and NNNNRYAC.

[0011] In some embodiments, the gRNA is a dual gRNA (dgRNA). In some embodiments, the gRNA is a single gRNA (sgRNA). In some embodiments, the sgRNA and comprises one or more modified nucleosides. In some embodiments, the Cas nuclease is a class 2 Cas nuclease. In some embodiments, the Cas nuclease is selected from the group consisting of S. pyogenes nuclease, S. aureus nuclease, C. jejuni nuclease, S. thermophilus nuclease, N. meningitidis nuclease, and variants thereof. In some embodiments, the Cas nuclease is Cas9. In some embodiments, the Cas nuclease is a nickase.

[0012] In some embodiments, the construct is a bidirectional nucleic acid construct. In some embodiments, the construct comprises: i. a first segment comprising a coding sequence for a heterologous polypeptide; and ii. a second segment comprising a reverse complement of a coding sequence of the heterologous polypeptide. In some embodiments, the construct comprises a polyadenylation signal sequence. In some embodiments, the construct comprises a splice acceptor site. In some embodiments, the construct does not comprise a homology arm.

[0013] In some embodiments, the gRNA is administered in a vector and/or a lipid nanoparticle. In some embodiments, the RNA-guided DNA binding agent is administered in a vector and/or a lipid nanoparticle. In some embodiments, the construct comprising the heterologous gene is administered in a vector and/or a lipid nanoparticle. In some embodiments, the vector is a viral vector. In some embodiments, the viral vector is selected from the group consisting of adeno-associated viral (AAV) vector, adenovirus vector, retrovirus vector, and lentivirus vector. In some embodiments, the AAV vector is selected from the group consisting of AAV1, AAV2, AAV3, AAV3B, AAV4, AAV5, AAV6, AAV6.2, AAV7, AAVrh.64R1, AAVhu.37, AAVrh.8, AAVrh.32.33, AAV8, AAV9, AAV-DJ, AAV2/8, AAVrh10, AAVLK03, AV10, AAV11, AAV12, rh10, and hybrids thereof.

[0014] In some embodiments, the gRNA, the RNA-guided DNA binding agent, and the construct comprising a coding sequence for the heterologous polypeptide, individually or in any combination, are administered simultaneously. In some embodiments, the gRNA, the RNA-guided DNA binding agent, and the construct comprising a coding sequence for the heterologous polypeptide are administered sequentially, in any order and/or in any combination. In some embodiments, the RNA-guided DNA binding agent, or RNA-guided DNA binding agent and gRNA in combination, is administered prior to providing the construct. In some embodiments, the construct comprising a coding sequence for the heterologous polypeptide is administered prior to the gRNA and/or RNA-guided DNA binding agent.

[0015] In some embodiments, the heterologous polypeptide is a secreted polypeptide. In some embodiments, the heterologous polypeptide is an intracellular polypeptide.

[0016] In some embodiments, the cell is a liver cell. In some embodiments, the liver cell is a hepatocyte.

[0017] In some embodiments, expression of the heterologous polypeptide in the host cell is increased by at least about 2%, about 3%, about 4%, about 5%, about 6%, about 7%, about 8%, about 9%, about 10%, or more, relative to a level in the cell prior to administering the gRNA, RNA-guided DNA binding agent, and construct comprising a coding sequence for the heterologous polypeptide.

[0018] In some embodiments, the gRNA comprising SEQ ID NO: 301.

[0019] In some embodiments, the gRNA mediates target-specific cutting by an RNA-guided DNA binding agent, results in insertion of the coding sequence for the heterologous polypeptide within intron 1 of an albumin gene. In some embodiments, the cutting results in a rate of at least about 10% insertion of a heterologous nucleic acid in the cell population. In some embodiments, the cutting results in a rate of between about 30 and 35%, about 35 and 40%, about 40 and 45%, about 45 and 50%, about 50 and 55%, about 55 and 60%, about 60 and 65%, about 65 and 70%, about 70 and 75%, about 75 and 80%, about 80 and 85%, about 85 and 90%, about 90 and 95%, or about 95 and 99% insertion of the coding sequence for the heterologous polypeptide.

[0020] In some embodiments, the RNA-guided DNA-binding protein is an S. pyogenes Cas9 nuclease. In some embodiments, the nuclease is a cleavase or a nickase.

[0021] In some embodiments, the method further comprises administering an LNP comprising the gRNA. In some embodiments, the method further comprises administering an LNP comprising an mRNA that encodes the RNA-guided DNA-binding agent. In some embodiments, the LNP comprises the gRNA and the mRNA that encodes the RNA-guided DNA-binding agent. In some embodiments, the gRNA and the RNA-guided DNA-binding protein are administered as an RNP. In some embodiments, the construct is administered via a vector.

[0022] In one aspect, the present disclosure provides a host cell made by any one or more of the foregoing methods.

[0023] In one aspect, the present disclosure provides a cell comprising a bidirectional nucleic acid construct encoding a heterologous polypeptide integrated within intron 1 of an albumin locus of a host cell. In some embodiments, the host cell is a liver cell. In some embodiments, the liver cell is a hepatocyte.

### BRIEF DESCRIPTION OF THE DRAWINGS

[0024] FIG. 1 shows construct formats as represented in AAV genomes. SA=splice acceptor; pA=polyA signal sequence; HA=homology arm; LHA=left homology arm; RHA=right homology arm.

[0025] FIG. 2 shows vectors without homology arms are not effective in an immortalized liver cell line (Hepa1-6). An scAAV derived from plasmid P00204 comprising 200 bp homology arms resulted in expression of hFIX in the dividing cells. Use of the AAV vectors derived from P00123 (scAAV lacking homology arms) and P00147 (ssAAV bidirectional construct lacking homology arms) did not result in detectable expression of hFIX.

[0026] FIGS. 3A and 3B show results from in vivo testing of insertion templates with and without homology arms using vectors derived from P00123, P00147, or P00204. FIG. 3A shows liver editing levels as measured by indel formation of ˜60% were detected in each group of animals treated with LNPs comprising CRISPR/Cas9 components. FIG. 3B shows animals receiving the ssAAV vectors without homology arms (derived from P00147) in combination with LNP treatment resulted in the highest level of hFIX expression in serum.

[0027] FIGS. 4A and 4B show results from in vivo testing of ssAAV insertion templates with and without homology arms. FIG. 4A compares targeted insertion with vectors derived from plasmids P00350, P00356, P00362 (having asymmetrical homology arms as shown), and P00147 (bidirectional construct as shown in FIG. 4B). FIG. 4B compares insertion into a second site targeted with vectors derived from plasmids P00353, P00354 (having symmetrical homology arms as shown), and P00147.

[0028] FIGS. 5A-5D show results of targeted insertion of bidirectional constructs across 20 target sites in primary mouse hepatocytes. FIG. 5A shows the schematics of each of the vectors tested. FIG. 5B shows editing as measured by indel formation for each of the treatment groups across each combination tested. FIG. 5C and FIG. 5D show that significant levels of editing (as indel formation at a specific target site) did not necessarily result in more efficient insertion or expression of the transgenes. hSA=human F9 splice acceptor; mSA=mouse albumin splice acceptor; HiBit=tag for luciferase based detection; pA=polyA signal sequence; Nluc=nanoluciferase reporter; GFP=green fluorescent reporter.

[0029] FIG. 6 shows results from in vivo screening of targeted insertion with bidirectional constructs across 10 target sites using with ssAAV derived from P00147. As shown, significant levels of indel formation do not necessarily result in high levels of transgene expression.

[0030] FIGS. 7A-7D show results from in vivo screening of bidirectional constructs across 20 target sites using ssAAV derived from P00147. FIG. 7A shows varied levels of editing as measured by indel formation were detected for each of the treatment groups across each LNP/vector combination tested. FIG. 7B provides corresponding targeted insertion data. The results show poor correlation between indel formation and insertion or expression of the bidirectional constructs (FIG. 7B and FIG. 7D), and a positive correlation between in vitro and in vivo results (FIG. 7C).

[0031] FIGS. 8A and 8B show insertion of the bidirectional construct at the cellular level using in situ hybridization method using probes that can detect the junctions between the hFIX transgene and the mouse albumin exon 1 sequence (FIG. 8A). Circulating hFIX levels correlated with the number of cells that were positive for the hybrid transcript (FIG. 8B).

[0032] FIG. 9 shows the effect on targeted insertion of varying the timing between delivery of the ssAAV comprising the bidirectional hFIX construct and LNP.

[0033] FIG. 10 shows the effect on targeted insertion of repeat dosing (e.g., 1, 2, or 3 doses) of LNP following delivery of the bidirectional hFIX construct.

[0034] FIG. 11A shows the durability of hFIX expression in vivo. FIG. 11B demonstrates expression from intron 1 of albumin was sustained.

[0035] FIG. 12A and FIG. 12B show that varying the AAV or LNP dose can modulate the amount of expression of hFIX from intron 1 of the albumin gene in vivo.

[0036] FIGS. 13A-13C show results from screening bidirectional constructs across target sites in primary cynomolgus hepatocytes. FIG. 13A shows varied levels of editing as measured by indel formation detected for each of the samples. FIG. 13B and FIG. 13C show that significant levels of indel formation was not predictive for insertion or expression of the bidirectional constructs into intron 1 of the albumin gene.

[0037] FIGS. 14A-14D show results from screening bidirectional constructs across target sites in primary human hepatocytes. FIG. 14A shows editing as measured by indel formation detected for each of the samples. FIG. 14B, FIGS. 14C, and 14 D show that significant levels of indel formation was not predictive for insertion or expression of the bidirectional constructs into intron 1 of the albumin gene.

[0038] FIG. 15 shows the results of in vivo studies where non-human primates were dosed with LNPs along with a bi-directional hFIX insertion template (derived from P00147). Systemic hFIX levels were achieved only in animals treated with both LNPs and AAV, with no hFIX detectable using AAV or LNPs alone.

[0039] FIG. 16A and FIG. 16B show human Factor IX expression levels in the plasma samples at week 6 post-injection.

[0040] FIG. 17 shows week 7 serum levels and % positive cells across the multiple lobes for each animal.

### DETAILED DESCRIPTION

[0041] Reference will now be made in detail to certain embodiments of the invention, examples of which are illustrated in the accompanying drawings. While the present teachings are described in conjunction with various embodiments, it is not intended to limit the present teachings to those embodiments. On the contrary, the present teachings encompass various alternatives, modifications, and equivalents, as will be appreciated by those of skill in the art.

[0042] Before describing the present teachings in detail, it is to be understood that the disclosure is not limited to specific compositions or process steps, as such may vary. It should be noted that, as used in this specification and the appended claims, the singular form “a”, “an” and “the” include plural references unless the context dictates otherwise. Thus, for example, reference to “a conjugate” includes a plurality of conjugates and reference to “a cell” includes a plurality of cells and the like. As used herein, the term “include” and its grammatical variants are intended to be non-limiting, such that recitation of items in a list is not to the exclusion of other like items that can be substituted or added to the listed items.

[0043] Numeric ranges are inclusive of the numbers defining the range. Measured and measureable values are understood to be approximate, taking into account significant digits and the error associated with the measurement. Also, the use of “comprise”, “comprises”, “comprising”, “contain”, “contains”, “containing”, “include”, “includes”, and “including” are not intended to be limiting. It is to be understood that both the foregoing general description and detailed description are exemplary and explanatory only and are not restrictive of the teachings.

[0044] Unless specifically noted in the specification, embodiments in the specification that recite “comprising” various components are also contemplated as “consisting of” or “consisting essentially of” the recited components: embodiments in the specification that recite “consisting of” various components are also contemplated as “comprising” or “consisting essentially of” the recited components; and embodiments in the specification that recite “consisting essentially of” various components are also contemplated as “consisting of” or “comprising” the recited components (this interchangeability does not apply to the use of these terms in the claims). The term “or” is used in an inclusive sense, i.e., equivalent to “and/or.” unless the context clearly indicates otherwise. The term “about”, when used before a list, modifies each member of the list. The term “about” or “approximately” means an acceptable error for a particular value as determined by one of ordinary skill in the art, which depends in part on how the value is measured or determined.

[0045] The term “about”, when used before a list, modifies each member of the list. The term “about” or “approximately” means an acceptable error for a particular value as determined by one of ordinary skill in the art, which depends in part on how the value is measured or determined.

[0046] The section headings used herein are for organizational purposes only and are not to be construed as limiting the desired subject matter in any way. In the event that any material incorporated by reference contradicts any term defined in this specification or any other express content of this specification, this specification controls. While the present teachings are described in conjunction with various embodiments, it is not intended that the present teachings be limited to such embodiments. On the contrary, the present teachings encompass various alternatives, modifications, and equivalents, as will be appreciated by those of skill in the art.

### I. Definitions

[0047] Unless stated otherwise, the following terms and phrases as used herein are intended to have the following meanings:

[0048] “Polynucleotide” and “nucleic acid” are used herein to refer to a multimeric compound comprising nucleosides or nucleoside analogs which have nitrogenous heterocyclic bases or base analogs linked together along a backbone, including conventional RNA, DNA, mixed RNA-DNA, and polymers that are analogs thereof. A nucleic acid “backbone” can be made up of a variety of linkages, including one or more of sugar-phosphodiester linkages, peptide-nucleic acid bonds (“peptide nucleic acids” or PNA; PCT No. WO 95/32305), phosphorothioate linkages, methylphosphonate linkages, or combinations thereof. Sugar moieties of a nucleic acid can be ribose, deoxyribose, or similar compounds with optional substitutions, e.g., 2′ methoxy or 2′ halide substitutions. Nitrogenous bases can be conventional bases (A, G, C. T. U), analogs thereof (e.g., modified uridines such as 5-methoxyuridine, pseudouridine, or N1-methylpseudouridine, or others); inosine; derivatives of purines or pyrimidines (e.g., N⁴-methyl deoxyguanosine, deaza- or aza-purines, deaza- or aza-pyrimidines, pyrimidine bases with substituent groups at the 5 or 6 position (e.g., 5-methylcytosine), purine bases with a substituent at the 2, 6, or 8 positions, 2-amino-6-methylaminopurine, 06-methylguanine, 4-thio-pyrimidines, 4-amino-pyrimidines, 4-dimethylhydrazine-pyrimidines, and 04-alkyl-pyrimidines; U.S. Pat. No. 5,378,825 and PCT No. WO 93/13121). For general discussion see The Biochemistry of the Nucleic Acids 5-36, Adams et al., ed., 11^{th} ed., 1992). Nucleic acids can include one or more “abasic” residues where the backbone includes no nitrogenous base for position(s) of the polymer (U.S. Pat. No. 5,585,481). A nucleic acid can comprise only conventional RNA or DNA sugars, bases and linkages, or can include both conventional components and substitutions (e.g., conventional nucleosides with 2′ methoxy substituents, or polymers containing both conventional nucleotides and one or more nucleotide analogs). Nucleic acid includes “locked nucleic acid” (LNA), an analogue containing one or more LNA nucleotide monomers with a bicyclic furanose unit locked in an RNA mimicking sugar conformation, which enhance hybridization affinity toward complementary RNA and DNA sequences (Vester and Wengel, 2004, Biochemistry 43 (42): 13233-41). RNA and DNA have different sugar moieties and can differ by the presence of uracil or analogs thereof in RNA and thymine or analogs thereof in DNA.

[0049] “Guide RNA”, “gRNA”, and simply “guide” are used herein interchangeably to refer to a guide that comprises a guide sequence, e.g. either a crRNA (also known as CRISPR RNA), or the combination of a crRNA and a trRNA (also known as tracrRNA). The crRNA and trRNA may be associated as a single RNA molecule (single guide RNA, sgRNA) or, for example, in two separate RNA molecules (dual guide RNA, dgRNA). “Guide RNA” or “gRNA” refers to each type. The trRNA may be a naturally-occurring sequence, or a trRNA sequence with modifications or variations compared to naturally-occurring sequences. Guide RNAs, such as sgRNAs or dgRNAs, can include modified RNAs as described herein.

[0050] As used herein, a “guide sequence” refers to a sequence within a guide RNA that is complementary to a target sequence and functions to direct a guide RNA to a target sequence for binding or modification (e.g., cleavage) by an RNA-guided DNA-binding agent. A “guide sequence” may also be referred to as a “targeting sequence,” or a “spacer sequence.” A guide sequence can be 20 base pairs in length, e.g., in the case of Streptococcus pyogenes (i.e., Spy Cas9) and related Cas9 homologs/orthologs. Shorter or longer sequences can also be used as guides, e.g., 15-, 16-, 17-, 18-, 19-, 21-, 22-, 23-, 24-, or 25-nucleotides in length. In some embodiments, the target sequence is in a gene or on a chromosome, for example, and is complementary to the guide sequence. In some embodiments, the degree of complementarity or identity between a guide sequence and its corresponding target sequence may be about 75%, 80%, 85%, 90%, 95%, 96%, 97%, 98%, 99%, or 100%. In some embodiments, the guide sequence and the target region may be 100% complementary or identical. In other embodiments, the guide sequence and the target region may contain at least one mismatch. For example, the guide sequence and the target sequence may contain 1, 2, 3, or 4 mismatches, where the total length of the target sequence is at least 17, 18, 19, 20 or more base pairs. In some embodiments, the guide sequence and the target region may contain 1-4 mismatches where the guide sequence comprises at least 17, 18, 19, 20 or more nucleotides. In some embodiments, the guide sequence and the target region may contain 1, 2, 3, or 4 mismatches where the guide sequence comprises 20 nucleotides.

[0051] Target sequences for RNA-guided DNA-binding agents include both the positive and negative strands of genomic DNA (i.e., the sequence given and the sequence's reverse complement), as a nucleic acid substrate for an RNA-guided DNA-binding agent is a double stranded nucleic acid. Accordingly, where a guide sequence is said to be “complementary to a target sequence”, it is to be understood that the guide sequence may direct a guide RNA to bind to the sense or antisense strand (e.g. reverse complement) of a target sequence. Thus, in some embodiments, where the guide sequence binds the reverse complement of a target sequence, the guide sequence is identical to certain nucleotides of the target sequence (e.g., the target sequence not including the PAM) except for the substitution of U for T in the guide sequence.

[0052] As used herein, an “RNA-guided DNA-binding agent” means a polypeptide or complex of polypeptides having RNA and DNA binding activity, or a DNA-binding subunit of such a complex, wherein the DNA binding activity is sequence-specific and depends on the sequence of the RNA. The term RNA-guided DNA binding-agent also includes nucleic acids encoding such polypeptides. Exemplary RNA-guided DNA-binding agents include Cas cleavases/nickases. Exemplary RNA-guided DNA-binding agents may include inactivated forms thereof (“dCas DNA-binding agents”), e.g. if those agents are modified to permit DNA cleavage, e.g. via fusion with a FokI cleavase domain. “Cas nuclease”, as used herein, encompasses Cas cleavases and Cas nickases. Cas cleavases and Cas nickases include a Csm or Cmr complex of a type III CRISPR system, the Cas10, Csm1, or Cmr2 subunit thereof, a Cascade complex of a type I CRISPR system, the Cas3 subunit thereof, and Class 2 Cas nucleases. As used herein, a “Class 2 Cas nuclease” is a single-chain polypeptide with RNA-guided DNA binding activity. Class 2 Cas nucleases include Class 2 Cas cleavases/nickases (e.g., H840A, D10A, or N863A variants), which further have RNA-guided DNA cleavases or nickase activity, and Class 2 dCas DNA-binding agents, in which cleavase/nickase activity is inactivated”), if those agents are modified to permit DNA cleavage. Class 2 Cas nucleases include, for example, Cas9, Cpf1, C2c1, C2c2, C2c3, HF Cas9 (e.g., N497A, R661A, Q695A, Q926A variants), HypaCas9 (e.g., N692A, M694A, Q695A, H698A variants), eSPCas9 (1.0) (e.g. K810A, K1003A, R1060A variants), and eSPCas9 (1.1) (e.g., K848A, K1003A, R1060A variants) proteins and modifications thereof. Cpf1 protein, Zetsche et al., Cell, 163:1-13 (2015), also contains a RuvC-like nuclease domain. Cpf1 sequences of Zetsche are incorporated by reference in their entirety. See, e.g., Zetsche, Tables S1 and S3. See, e.g., Makarova et al., Nat Rev Microbiol, 13 (11): 722-36 (2015); Shmakov et al., Molecular Cell, 60:385-397 (2015). As used herein, delivery of an RNA-guided DNA-binding agent (e.g. a Cas nuclease, a Cas9 nuclease, or an S. pyogenes Cas9 nuclease) includes delivery of the polypeptide or mRNA.

[0053] As used herein, “ribonucleoprotein” (RNP) or “RNP complex” refers to a guide RNA together with an RNA-guided DNA-binding agent, such as a Cas nuclease, e.g., a Cas cleavase, Cas nickase, Cas9 cleavase or Cas9 nickase. In some embodiments, the guide RNA guides the RNA-guided DNA-binding agent such as a Cas9 to a target sequence, and the guide RNA hybridizes with and the agent binds to the target sequence; and binding can be followed by cleaving or nicking.

[0054] As used herein, a first sequence is considered to “comprise a sequence with at least X % identity to” a second sequence if an alignment of the first sequence to the second sequence shows that X % or more of the positions of the second sequence in its entirety are matched by the first sequence. For example, the sequence AAGA comprises a sequence with 100% identity to the sequence AAG because an alignment would give 100% identity in that there are matches to all three positions of the second sequence. The differences between RNA and DNA (generally the exchange of uridine for thymidine or vice versa) and the presence of nucleoside analogs such as modified uridines do not contribute to differences in identity or complementarity among polynucleotides as long as the relevant nucleotides (such as thymidine, uridine, or modified uridine) have the same complement (e.g., adenosine for all of thymidine, uridine, or modified uridine; another example is cytosine and 5-methylcytosine, both of which have guanosine or modified guanosine as a complement). Thus, for example, the sequence 5′-AXG where X is any modified uridine, such as pseudouridine, N1-methyl pseudouridine, or 5-methoxyuridine, is considered 100% identical to AUG in that both are perfectly complementary to the same sequence (5′-CAU). Exemplary alignment algorithms are the Smith-Waterman and Needleman-Wunsch algorithms, which are well-known in the art. One skilled in the art will understand what choice of algorithm and parameter settings are appropriate for a given pair of sequences to be aligned; for sequences of generally similar length and expected identity >50% for amino acids or >75% for nucleotides, the Needleman-Wunsch algorithm with default settings of the Needleman-Wunsch algorithm interface provided by the EBI at the www.ebi.ac.uk web server is generally appropriate.

[0055] As used herein, a first sequence is considered to be “X % complementary to” a second sequence if X % of the bases of the first sequence base pair with the second sequence. For example, a first sequence 5′AAGA3′ is 100% complementary to a second sequence 3′TTCT5′, and the second sequence is 100% complementary to the first sequence. In some embodiments, a first sequence 5′AAGA3′ is 100% complementary to a second sequence 3′TTCTGTGA5′, whereas the second sequence is 50% complementary to the first sequence.

[0056] “mRNA” is used herein to refer to a polynucleotide that comprises an open reading frame that can be translated into a polypeptide (i.e., can serve as a substrate for translation by a ribosome and amino-acylated tRNAs). mRNA will predominantly comprise RNA or modified RNA and it can comprise a phosphate-sugar backbone including ribose residues or analogs thereof, e.g., 2′-methoxy ribose residues. In some embodiments, the sugars of an mRNA phosphate-sugar backbone consist essentially of ribose residues, 2′-methoxy ribose residues, or a combination thereof. Bases of an mRNA can modified bases such as pseudouridine, N-1-methyl-psuedouridine, or other naturally occurring or non-naturally occurring bases.

[0057] Exemplary guide sequences useful in the compositions and methods described herein are shown in Table 1 and throughout the application.

[0058] As used herein, “indels” refer to insertion/deletion mutations consisting of a number of nucleotides that are either inserted or deleted at the site of double-stranded breaks (DSBs) in a target nucleic acid.

[0059] As used herein, “polypeptide” refers to a wild-type or variant protein (e.g., mutant, fragment, fusion, or combinations thereof). A variant polypeptide may possess at least or about 5%, 10%, 15%, 20%, 30%, 35%, 40%, 45%, 50%, 55%, 60%, 65%, 70%, 75%, 80%, 85%, 90%, 95%, or 100% functional activity of the wild-type polypeptide. In some embodiments, the variant is at least 70%, 75%, 80%, 85%, 90%, 92%, 93%, 94%, 95%, 96%, 97%, 98%, or 99% identical to the sequence of the wild-type polypeptide. In some embodiments, a variant polypeptide may be a hyperactive variant. In certain instances, the variant possesses between about 80% and about 120%, 140%, 160%, 180%, 200%, 300%, 400%, 500%, or more of a functional activity of the wild-type polypeptide.

[0060] As used herein, a “target sequence” refers to a sequence of nucleic acid in a target gene that has complementarity to the guide sequence of the gRNA. The interaction of the target sequence and the guide sequence directs an RNA-guided DNA-binding agent to bind, and potentially nick or cleave (depending on the activity of the agent), within the target sequence.

[0061] As used herein, a “heterologous gene” refers to a gene that has been introduced as an exogenous source to a site within a host cell genome (e.g., an albumin intron 1 site). That is, the introduced gene is heterologous with respect to its insertion site. A polypeptide expressed from such heterologous gene is referred to as a “heterologous polypeptide.” The heterologous gene can be naturally-occuring or engineered, and can be wild type or a variant. The heterologous gene may include nucleotide sequences other than the sequence that encodes the heterologous polypeptide (e.g., an internal ribosomal entry site). The heterologous gene can be a gene that occurs naturally in the host genome, as a wild type or a variant (e.g., mutant). For example, although the host cell contains the gene of interest (as a wild type or as a variant), the same gene or variant thereof can be introduced as an exogenous source for, e.g., expression at a locus that is highly expressed. The heterologous gene can also be a gene that is not naturally occurring in the host genome, or that expresses a heterologous polypeptide that does not naturally occur in the host genome. “Heterologous gene”, “exogenous gene”, and “transgene” are used interchangeably. In some embodiments, the heterologous gene or transgene includes an exogenous nucleic acid sequence, e.g. a nucleic acid sequence is not endogenous to the recipient cell. In some embodiments, the heterologous gene or transgene includes an exogenous nucleic acid sequence, e.g. a nucleic acid sequence that does not naturally occur in the recipient cell. For example, a heterologous gene may be heterologous with respect to its insertion site and with respect to its recipient cell.

[0062] A heterologous gene may be inserted into a safe harbor locus within the genome without significant deleterious effects on the host cell, e.g. hepatocyte, e.g., without causing apoptosis, necrosis, and/or senescence, or without causing more than 5%, 10%, 15%, 20%, 25%, 30%, or 40% apoptosis, necrosis, and/or senescence as compared to a control cell. See, e.g., Hsin et al., “Hepatocyte death in liver inflammation, fibrosis, and tumorigenesis,” 2017. In some embodiments, a safe harbor locus allows overexpression of an exogenous gene without significant deleterious effects on the host cell, e.g. hepatocyte, e.g., without causing apoptosis, necrosis, and/or senescence, or without causing more than 5%, 10%, 15%, 20%, 25%, 30%, or 40% apoptosis, necrosis, and/or senescence as compared to a control cell. In some embodiments, a desirable safe harbor locus may be one in which expression of the inserted gene sequence is not perturbed by read-through expression from neighboring genes. In some embodiments, a safe harbor locus allows expression of an exogenous gene without significant deleterious effects on the host cell or cell population, such as hepatocytes or liver cells, e.g. without causing apoptosis, necrosis, and/or senescence, or without causing more than 5%, 10%, 15%, 20%, 25%, 30%, or 40% apoptosis, necrosis, and/or senescence as compared to a control cell or cell population.

[0063] In some embodiments, the heterologous gene may be inserted into a safe harbor locus and use the safe harbor locus's endogenous signal sequence, e.g., the albumin signal sequence encoded by exon 1. For example, an coding sequence may be inserted into human albumin intron 1 such that it is downstream of and fuses to the signal sequence of human albumin exon 1.

[0064] In some embodiments, the gene may comprise its own signal sequence, may be inserted into the safe harbor locus, and may further use the safe habor locus's endogenous signal sequence. For example, an coding sequence comprising its native signal sequence may be inserted into human albumin intron 1 such that it is downstream of and and fuses to the signal sequence of human albumin encoded by exon 1.

[0065] In some embodiments, the gene may comprise its own signal sequence and an internal ribosomal entry site (IRES), may be inserted into the safe harbor locus, and may further use the safe habor locus's endogenous signal sequence. For example, a coding sequence comprising its native signal sequence and an IRES sequence may be inserted into human albumin intron 1 such that it is downstream of and fuses to the signal sequence of human albumin encoded by exon 1.

[0066] In some embodiments, the gene may comprise its own signal sequence and IRES, may be inserted into the safe harbor locus, and does not use the safe habor locus's endogenous signal sequence. For example, a coding sequence comprising its native signal sequence and an IRES sequence may be inserted into human albumin intron 1 such that it does not fuse to the signal sequence of human albumin encoded by exon 1. In these embodiments, the protein is translated from the IRES site and is not chimeric (e.g., albumin signal peptide fused to heterologous protein), which may be advantageously non- or low-immunogenic. In some embodiments, the protein is not secreted and/or transported extracellularly.

[0067] In some embodiments, the gene may be inserted into the safe harbor locus and may comprise an IRES and does not not use any signal sequence. For example, a coding sequence comprising an IRES sequence and no native signal sequence may be inserted into human albumin intron 1 such that it does not fuse to the signal sequence of human albumin encoded by exon 1. In some embodiments, the proteins is translated from the IRES site without any signal sequence. In some embodiments, the protein is not secreted and/or transported extracellularly.

[0068] As used herein, a “bidirectional nucleic acid construct” (interchangeably referred to herein as “bidirectional construct”) comprises at least two nucleic acid segments, wherein one segment (the first segment) comprises a coding sequence that encodes an agent of interest (the coding sequence may be referred to herein as “transgene” or a first transgene), while the other segment (the second segment) comprises a sequence wherein the complement of the sequence encodes an agent of interest, or a second transgene.

[0069] In one embodiment, a bidirectional construct comprise at least two nucleic acid segments in cis, wherein one segment (the first segment) comprises a coding sequence (sometimes interchangeably referred to herein as “transgene”), while the other segment (the second segment) comprises a sequence wherein the complement of the sequence encodes a transgene. The first transgene and the second transgene may be the same or different. The bidirectional constructs may comprise at least two nucleic acid segments in cis, wherein one segment (the first segment) comprises a coding sequence that encodes a heterologous gene in one orientation, while the other segment (the second segment) comprises a sequence wherein its complement encodes the heterologous gene in the other orientation. That is, the first segment is a complement of the second segment (not necessarily a perfect complement); the complement of the second segment is the reverse complement of the first segment (not necessarily a perfect reverse complement though both encode the same heterologous protein). A bidirectional construct may comprise a first coding sequence that encodes a heterologous gene linked to a splice acceptor and a second coding sequence wherein the complement encodes a heterologous gene in the other orientation, also linked to a splice acceptor.

[0070] The agent may be therapeutic agent, such as a polypeptide, functional RNA, mRNA, or the like. The transgene may code for an agent such as a polypeptide, functional RNA, or mRNA. In some embodiments, the bidirectional nucleic acid construct comprises at least two nucleic acid segments, wherein one segment (the first segment) comprises a coding sequence that encodes a polypeptide of interest, while the other segment (the second segment) comprises a sequence wherein the complement of the sequence encodes a polypeptide of interest, or a second transgene. That is, the at least two segments can encode identical or different polypeptides or identical or different agents. When the two segments encode an identical polypeptide, the coding sequence of the first segment need not be identical to the complement of the sequence of the second segment. In some embodiments, the sequence of the second segment is a reverse complement of the coding sequence of the first segment. A bidirectional construct can be single-stranded or double-stranded. The bidirectional construct disclosed herein encompasses a construct that is capable of expressing any polypeptide of interest. The bidirectional constructs are useful for genomic insertion of transgene sequences, in particular targeted insertion of the transgene.

[0071] In some embodiments, a bidirectional nucleic acid construct comprises a first segment that comprises a coding sequence that encodes a first polypeptide (a first transgene), and a second segment that comprises a sequence wherein the complement of the sequence encodes a second polypeptide (a second transgene). In some embodiments, the first and the second polypeptides are at least 50%, 55%, 60%, 65%, 70%, 75%, 80%, 85%, 90%, 91%, 92%, 93%, 94%, 95%, 96%, 97%, 98%, 99%, or 100% identical. In some embodiments, the first and the second polypeptides comprise an amino acid sequence that is at least 80%, 85%, 90%, 91%, 92%, 93%, 94%, 95%, 96%, 97%, 98%, 99%, or 100% identical, e.g. across 50, 100, 200, 500, 1000 or more amino acid residues.

[0072] As used herein, a “reverse complement” refers to a sequence that is a complement sequence of a reference sequence, wherein the complement sequence is written in the reverse orientation. For example, for a hypothetical sequence 5′ CTGGACCGA 3′ (SEQ ID NO: 500), the “perfect” complement sequence is 3′ GACCTGGCT 5′ (SEQ ID NO: 501), and the “perfect” reverse complement is written 5′ TCGGTCCAG 3′ (SEQ ID NO: 502). A reverse complement sequence need not be “perfect” and may still encode the same polypeptide or a similar polypeptide as the reference sequence. Due to codon usage redundancy, a reverse complement can diverge from a reference sequence that encodes the same polypeptide. As used herein, “reverse complement” also includes sequences that are, e.g., 30%, 35%, 40%, 45%, 50%, 55%, 60%, 65%, 70%, 75%, 80%, 85%, 90%, 91%, 92%, 93%, 94%, 95%, 96%, 97%, 98%, 99%, or 100% identical to the reverse complement sequence of a reference sequence.

### II. Compositions

### A. Compositions Comprising Guide RNA (gRNAs)

[0073] Provided herein are compositions and methods useful for inserting and expressing a heterologous (exogenous) gene within a genomic locus, such as a safe harbor site, of a host cell. In particular, as exemplified herein, targeting and inserting an exogenous gene at the albumin locus (e.g., at intron 1) allows the use of albumin's endogenous promoter to drive robust expression of the exogenous gene. The present disclosure is based, in part, on the identification of guide RNAs that specifically target sites within intron 1 of the albumin gene, and which provide efficient insertion and expression of an exogenous gene. As shown in the Examples and further described herein, the ability of identified gRNAs to mediate high levels of editing as measured through indel forming activity, unexpectedly does not necessarily correlate with use of the same gRNAs to mediate efficient insertion of transgenes as measured through, e.g., expression of the transgene. That is, certain gRNAs that are able to achieve a significant level of indel formation are not necessarily able to mediate efficient insertion, and conversely, some gRNAs shown to achieve low levels of indel formation may mediate efficient insertion and expression of a transgene. Specifically, the data of the Examples indicate that gRNAs that effectively mediate indel formation (also called % editing) did not have indel editing activity that correlated with insertion editing activity.

[0074] In some embodiments, provided herein are compositions and methods useful for inserting and expressing an exogenous gene within intron 1 of the albumin gene in a host cell. In some embodiments, disclosed herein are compositions and methods useful for introducing or inserting a heterologous nucleic acid within an albumin locus of a host cell, e.g., using a guide RNA disclosed herein with an RNA-guided DNA binding agent, and a construct comprising a heterologous nucleic acid (“transgene”). In some embodiments, disclosed herein are compositions and methods useful for expressing a heterologous polypeptide at an albumin locus of a host cell, e.g., using a guide RNA disclosed herein with an RNA-guided DNA binding agent and a construct comprising a heterologous nucleic acid (“transgene”). In some embodiments, disclosed herein are compositions and methods useful for inducing a break (e.g., double-stranded break (DSB) or single-stranded break (nick)) within the albumin gene of a host cell, e.g., using a guide RNA disclosed herein with an RNA-guided DNA binding agent (e.g., a CRISPR/Cas system). The compositions and methods may be used in vitro or in vivo for, e.g., therapeutic purposes.

[0075] In some embodiments, the guide RNAs disclosed herein comprise a guide sequence that binds to, or is capable of binding, within an intron of an albumin locus. In some embodiments, the guide RNAs disclosed herein bind within a region of intron 1 of the human albumin gene (SEQ ID NO: 1). It will be appreciated that not every base of the guide sequence must bind within the recited regions. For example, in some embodiments, 15, 16, 17, 18, 19, 20, or more bases of the guide RNA sequence bind with the recited regions. For example, in some embodiments, 15, 16, 17, 18, 19, 20, or more contiguous bases of the guide RNA sequence bind with the recited regions.

[0076] In some embodiments, the guide RNAs disclosed herein mediate a target-specific cutting by an RNA-guided DNA binding agent (e.g., Cas nuclease) at a site within human albumin intron 1 (SEQ ID NO: 1). It will be appreciated that, in some embodiments, the guide RNAs comprise guide sequences that bind to, or are capable of binding to, a region in SEQ ID NO: 1.

[0077] In some embodiments, the guide RNAs disclosed herein comprise a guide sequence that is at least 95%, 90%, 85%, 80%, or 75% identical to a sequence selected from the group consisting of SEQ ID NOs: 2-33. In some embodiments, the guide RNAs disclosed herein comprise a guide sequence that is at least 95%, 90%, 85%, 80%, or 75% identical to a sequence selected from the group consisting of SEQ ID NOs: 164-196. In some embodiments, the guide RNAs disclosed herein comprise a guide sequence that is at least 95%, 90%, 85%, 80%, or 75% identical to a sequence selected from the group consisting of SEQ ID NOs: 98-119. In some embodiments, the guide RNAs disclosed herein comprise a guide sequence that is at least 95%, 90%, 85%, 80%, or 75% identical to a sequence selected from Table 1. The gRNA may comprise one or more of the guide sequences shown in Table 1. The gRNA may comprise one or more of the sequences shown in Tables 1, 7 and 9. The gRNA may comprise one or more of the sequences shown in Tables 2, 8, and 10. The guide RNA may comprise one or more of SEQ ID NOs: 2-33. The gRNA may comprise one or more of SEQ ID NOs: 164-196. The gRNA may comprise one or more of SEQ ID NOs: 98-119.

[0078] In some embodiments, the guide RNAs disclosed herein comprise a guide sequence having at least 15, 16, 17, 18, 19, or 20 contiguous nucleotides of a sequence selected from the group consisting of SEQ ID NOs: 2-33. In some embodiments, the guide RNAs disclosed herein comprise a guide sequence having at least 15, 16, 17, 18, 19, or 20 contiguous nucleotides of a sequence selected from the group consisting of SEQ ID NOs: 164-196. In some embodiments, the guide RNAs disclosed herein comprise a guide sequence having at least 15, 16, 17, 18, 19, or 20 contiguous nucleotides of a sequence selected from the group consisting of SEQ ID NOs: 98-119. In some embodiments, the guide RNAs disclosed herein comprise a guide sequence having at least 15, 16, 17, 18, 19, or 20 contiguous nucleotides of a sequence selected from the Table 1.

[0079] In some embodiments, the guide RNA comprises a sequence selected from the group consisting of SEQ ID NO: 2. SEQ ID NO: 3, SEQ ID NO: 4, SEQ ID NO: 5, SEQ ID NO: 6, SEQ ID NO: 7, SEQ ID NO: 8, SEQ ID NO: 9, SEQ ID NO: 10, SEQ ID NO: 11, SEQ ID NO: 12, SEQ ID NO: 13, SEQ ID NO: 14, SEQ ID NO: 15, SEQ ID NO: 16, SEQ ID NO: 17, SEQ ID NO: 18, SEQ ID NO: 19, SEQ ID NO: 20, SEQ ID NO: 21, SEQ ID NO: 22, SEQ ID NO: 23, SEQ ID NO: 24, SEQ ID NO: 25, SEQ ID NO: 26, SEQ ID NO: 27, SEQ ID NO: 28, SEQ ID NO: 29, SEQ ID NO: 30, SEQ ID NO: 31, SEQ ID NO: 32, and SEQ ID NO: 33.

[0080] In some embodiments, the albumin guide RNA (gRNA) comprises a guide sequence chosen from: a) a sequence that is at least 95%, 90%, 85%, 80%, or 75% identical to a sequence selected from the group consisting of SEQ ID NOs: 2, 8, 13, 19, 28, 29, 31, 32, 33; b) at least 17, 18, 19, or 20 contiguous nucleotides of a sequence selected from the group consisting of SEQ ID NOs: 2, 8, 13, 19, 28, 29, 31, 32, 33; c) a sequence selected from the group consisting of SEQ ID NOs: 34, 40, 45, 51, 60, 61, 63, 64, 65, 66, 72, 77, 83, 92, 93, 95, 96, and 97; d) a sequence that is at least 95%, 90%, 85%, 80%, or 75% identical to a sequence selected from the group consisting of SEQ ID NOs: 2-33; e) at least 17, 18, 19, or 20 contiguous nucleotides of a sequence selected from the group consisting of SEQ ID NOS: 2-33; f) a sequence selected from the group consisting of SEQ ID NOs: 34-97; and g) a sequence that is complementary to 15 consecutive nucleotides+/−10 nucleotides of the genomic coordinates listed for SEQ ID NOs: 2-33. In some embodiments, the albumin guide RNA comprises a sequence selected from the group consisting of SEQ ID NO: 2, 8, 13, 19, 28, 29, 31, 32, 33. In some embodiments, the guide RNA comprises a sequence selected from the group consisting of SEQ ID NO: 4, 13, 17, 19, 27, 28, 30, and 31.

[0081] In some embodiments, the guide RNAs disclosed herein bind to a region upstream of a propospacer adjacent motif (PAM). As would be understood by those of skill in the art, the PAM sequence occurs on the strand opposite to the strand that contains the target sequence. That is, the PAM sequence is on the complement strand of the target strand (the strand that contains the target sequence to which the guide RNA binds). In some embodiments, the PAM is selected from the group consisting of NGG, NNGRRT, NNGRR (N), NNAGAAW, NNNNG (A/C) TT, and NNNNRYAC. In some embodiments, the PAM is NGG.

[0082] In some embodiments, the guide RNA sequences provided herein are complementary to a sequence adjacent to a PAM sequence.

[0083] In some embodiments, the guide RNA sequence comprises a sequence that is complementary to a sequence within a genomic region selected from Table 1 according to coordinates in human reference genome hg38. In some embodiments, the guide RNA sequence comprises a sequence that is complementary to a sequence that comprises 5, 6, 7, 8, 9, 10, 11, 12, 13, 14, 15, 16, 17, 18, 19, 20, 21, 22, 23, 24, or 25 consecutive nucleotides from within a genomic region selected from Table 1. In some embodiments, the guide RNA sequence comprises a sequence that is complementary to a sequence that comprises 5, 6, 7, 8, 9, 10, 11, 12, 13, 14, 15, 16, 17, 18, 19, 20, 21, 22, 23, 24, or 25 consecutive nucleotides spanning a genomic region selected from Table 1.

[0084] The guide RNAs disclosed herein mediate a target-specific cutting resulting in a double-stranded break (DSB). The guide RNAs disclosed herein mediate a target-specific cutting resulting in a single-stranded break (SSB or nick).

[0085] In some embodiments, the guide RNAs disclosed herein mediate target-specific cutting by an RNA-guided DNA binding agent (e.g., a Cas nuclease, as disclosed herein), resulting in insertion of a heterologous nucleic acid within intron 1 of an albumin gene. In some embodiments, the guide RNA and/or cutting at the cut site results in a rate of between 30 and 35%, 35 and 40%, 40 and 45° C., 45 and 50%, 50 and 55%, 55 and 60%, 60 and 65%, 65 and 70%, 70 and 75%, 75 and 80%, 80 and 85%, 85 and 90%, 90 and 95%, or 95 and 99% insertion of a heterologous gene. In some embodiments, the guide RNA and/or cutting results in at least 20%, at least 30%, at least 40%, at least 50%, at least 60%, at least 70%, at least 80%, at least 90% insertion of a heterologous nucleic acid. Insertion rates can be measured in vitro or in vivo. For example, in some embodiments, rate of insertion can be determined by detecting and measuring the inserted nucleic acid within a population of cells, and calculating a percentage of the population that contains the inserted nucleic acid. Methods of measuring insertion rates are known and available in the art. In some embodiments, the guide RNA allows between 5 and 10%, 10 and 15%, 15 and 20%, 20 and 25%, 25 and 30%, 30 and 35%, 35 and 40%, 40 and 45%, 45 and 50%, 50 and 55%, 55 and 60%, 60 and 65%, 65 and 70%, 70 and 75%, 75 and 80%, 80 and 85%, 85 and 90%, 90 and 95%, 95 and 99% or more increased expression of a heterologous gene. Increased expression of a heterologous gene can be measured in vitro or in vivo. For example, in some embodiments, increased expression can be determined by detecting and measuring the heterologous polypeptide level and comparing the level against the polypeptide level before, e.g., treating the cells or administration to a subject. In some embodiments, increased expression can be determined by detecting and measuring the heterologous polypeptide level and comparing the level against a known polypeptide level, e.g., a normal level of the polypeptide in a healthy subject.

[0086] Each of the guide sequences shown in Table 1 may further comprise additional nucleotides to form a crRNA, e.g., with the following exemplary nucleotide sequence following the guide sequence at its 3′ end: GUUUUAGAGCUAUGCUGUUUUG (SEQ ID NO: 300) in 5′ to 3′ orientation. Genomic coordinates are according to human reference genome hg38. In the case of a sgRNA, the above guide sequences may further comprise additional nucleotides to form a sgRNA, e.g., with the following exemplary nucleotide sequence following the 3′ end of the guide sequence: GUUUUAGAGCUAGAAAUAGCAAGUUAAAAUAAGGCUAGUCCGUUAUCAACUU GAAAAAGUGGCACCGAGUCGGUGCUUUU (SEQ ID NO: 301) or GUUUUAGAGCUAGAAAUAGCAAGUUAAAAUAAGGCUAGUCCGUUAUCAACUU GAAAAAGUGGCACCGAGUCGGUGC (SEQ ID NO: 302) in 5′ to 3′ orientation.

TABLE 1
Human guide RNA sequences and chromosomal coordinates

| | | | SEQ ID |
|---|---|---|---|
| Guide ID | Guide Sequence | Genomic Coordinates | NO: |
| G009844 | GAGCAACCUCACUCUUGUCU | chr4: 73405113-73405133 | 2 |
| G009851 | AUGCAUUUGUUUCAAAAUAU | chr4: 73405000-73405020 | 3 |
| G009852 | UGCAUUUGUUUCAAAAUAUU | chr4: 73404999-73405019 | 4 |
| G009857 | AUUUAUGAGAUCAACAGCAC | chr4: 73404761-73404781 | 5 |
| G009858 | GAUCAACAGCACAGGUUUUG | chr4: 73404753-73404773 | 6 |
| G009859 | UUAAAUAAAGCAUAGUGCAA | chr4: 73404727-73404747 | 7 |
| G009860 | UAAAGCAUAGUGCAAUGGAU | chr4: 73404722-73404742 | 8 |
| G009861 | UAGUGCAAUGGAUAGGUCUU | chr4: 73404715-73404735 | 9 |
| G009866 | UACUAAAACUUUAUUUUACU | chr4: 73404452-73404472 | 10 |
| G009867 | AAAGUUGAACAAUAGAAAAA | chr4: 73404418-73404438 | 11 |
| G009868 | AAUGCAUAAUCUAAGUCAAA | chr4: 73405013-73405033 | 12 |
| G009874 | UAAUAAAAUUCAAACAUCCU | chr4: 73404561-73404581 | 13 |
| G012747 | GCAUCUUUAAAGAAUUAUUU | chr4: 73404478-73404498 | 14 |
| G012748 | UUUGGCAUUUAUUUCUAAAA | chr4: 73404496-73404516 | 15 |
| G012749 | UGUAUUUGUGAAGUCUUACA | chr4: 73404529-73404549 | 16 |
| G012750 | UCCUAGGUAAAAAAAAAAAA | chr4: 73404577-73404597 | 17 |
| G012751 | UAAUUUUCUUUUGCGCACUA | chr4: 73404620-73404640 | 18 |
| G012752 | UGACUGAAACUUCACAGAAU | chr4: 73404664-73404684 | 19 |
| G012753 | GACUGAAACUUCACAGAAUA | chr4: 73404665-73404685 | 20 |
| G012754 | UUCAUUUUAGUCUGUCUUCU | chr4: 73404803-73404823 | 21 |
| G012755 | AUUAUCUAAGUUUGAAUAUA | chr4: 73404859-73404879 | 22 |
| G012756 | AAUUUUUAAAAUAGUAUUCU | chr4: 73404897-73404917 | 23 |
| G012757 | UGAAUUAUUCUUCUGUUUAA | chr4: 73404924-73404944 | 24 |
| G012758 | AUCAUCCUGAGUUUUUCUGU | chr4: 73404965-73404985 | 25 |
| G012759 | UUACUAAAACUUUAUUUUAC | chr4: 73404453-73404473 | 26 |
| G012760 | ACCUUUUUUUUUUUUUACCU | chr4: 73404581-73404601 | 27 |
| G012761 | AGUGCAAUGGAUAGGUCUUU | chr4: 73404714-73404734 | 28 |
| G012762 | UGAUUCCUACAGAAAAACUC | chr4: 73404973-73404993 | 29 |
| G012763 | UGGGCAAGGGAAGAAAAAAA | chr4: 73405094-73405114 | 30 |
| G012764 | CCUCACUCUUGUCUGGGCAA | chr4: 73405107-73405127 | 31 |
| G012765 | ACCUCACUCUUGUCUGGGCA | chr4: 73405108-73405128 | 32 |
| G012766 | UGAGCAACCUCACUCUUGUC | chr4: 73405114-73405134 | 33 |

[0087] The guide RNA may further comprise a trRNA. In each composition and method embodiment described herein, the crRNA and trRNA may be associated as a single RNA (sgRNA) or may be on separate RNAs (dgRNA). In the context of sgRNAs, the crRNA and trRNA components may be covalently linked, e.g., via a phosphodiester bond or other covalent bond. In some embodiments, the sgRNA comprises one or more linkages between nucleotides that is not a phosphodiester linkage.

[0088] In each of the composition, use, and method embodiments described herein, the guide RNA may comprise two RNA molecules as a “dual guide RNA” or “dgRNA”. The dgRNA comprises a first RNA molecule comprising a crRNA comprising, e.g., a guide sequence shown in Table 1, and a second RNA molecule comprising a trRNA. The first and second RNA molecules may not be covalently linked, but may form a RNA duplex via the base pairing between portions of the crRNA and the trRNA.

[0089] In each of the composition, use, and method embodiments described herein, the guide RNA may comprise a single RNA molecule as a “single guide RNA” or “sgRNA”. The sgRNA may comprise a crRNA (or a portion thereof) comprising a guide sequence shown in Table 1 covalently linked to a trRNA. The sgRNA may comprise 15, 16, 17, 18, 19, or 20 contiguous nucleotides of a guide sequence shown in Table 1. In some embodiments, the crRNA and the trRNA are covalently linked via a linker. In some embodiments, the sgRNA forms a stem-loop structure via the base pairing between portions of the crRNA and the trRNA. In some embodiments, the crRNA and the trRNA are covalently linked via one or more bonds that are not a phosphodiester bond.

[0090] In some embodiments, the trRNA may comprise all or a portion of a trRNA sequence derived from a naturally-occurring CRISPR/Cas system. In some embodiments, the trRNA comprises a truncated or modified wild type trRNA. The length of the trRNA depends on the CRISPR/Cas system used. In some embodiments, the trRNA comprises or consists of 5, 6, 7, 8, 9, 10, 11, 12, 13, 14, 15, 16, 17, 18, 19, 20, 25, 30, 40, 50, 60, 70, 80, 90, 100, or more than 100 nucleotides. In some embodiments, the trRNA may comprise certain secondary structures, such as, for example, one or more hairpin or stem-loop structures, or one or more bulge structures.

[0091] In some embodiments, the target sequence or region within intron 1 of a human albumin locus (e.g., nucleotide sequences corresponding to a region within SEQ ID NO: 1) may be complementary to the guide sequence of the guide RNA. In some embodiments, the degree of complementarity or identity between a guide sequence of a guide RNA and its corresponding target sequence may be at least 75%, 80%, 85%, 90%, 95%, 96%, 97%, 98%, 99%, or 100%. In some embodiments, the target sequence and the guide sequence of the gRNA may be 100% complementary or identical. In other embodiments, the target sequence and the guide sequence of the gRNA may contain at least one mismatch. For example, the target sequence and the guide sequence of the gRNA may contain 1, 2, 3, 4, or 5 mismatches, where the total length of the guide sequence is about 20, or 20. In some embodiments, the target sequence and the guide sequence of the gRNA may contain 1-4 mismatches where the guide sequence is about 20, or 20 nucleotides.

[0092] As described and exemplified herein, the albumin guide RNAs can be used to insert and express a heterologous gene (e.g., a transgene) at intron 1 of an albumin gene. Thus, in some embodiments, the present disclosure includes compositions comprising one or more guide RNA (gRNA) comprising guide sequences that direct a RNA-guided DNA binding agent (e.g., Cas9) to a target DNA sequence in an albumin gene.

[0093] In some embodiments, a composition or formulation disclosed herein comprises an mRNA comprising an open reading frame (ORF) encoding an RNA-guided DNA binding agent, such as a Cas nuclease as described herein. As described below, the mRNA comprising a Cas nuclease may comprise a Cas9 nuclease, such as an S. pyogenes Cas9 nuclease having cleavase, nickase, and/or site-specific DNA binding activity. In some embodiments, the ORF encoding an RNA-guided DNA nuclease is a “modified RNA-guided DNA binding agent ORF” or simply a “modified ORF,” which is used as shorthand to indicate that the ORF is modified.

[0094] Cas9 ORFs, including modified Cas9 ORFs, are provided herein and are known in the art. As one example, the Cas9 ORF can be codon optimized, such that coding sequence includes one or more alternative codons for one or more amino acids. An “alternative codon” as used herein refers to variations in codon usage for a given amino acid, and may or may not be a preferred or optimized codon (codon optimized) for a given expression system. Preferred codon usage, or codons that are well-tolerated in a given system of expression, is known in the art. The Cas9 coding sequences, Cas9 mRNAs, and Cas9 protein sequences of WO2013/176772, WO2014/065596, WO2016/106121, and WO2019/067910 are hereby incorporated by reference. In particular, the ORFs and Cas9 amino acid sequences of the table at paragraph [0449] WO2019/067910, and the Cas9 mRNAs and ORFs of paragraphs [0214]-[0234] of WO2019/067910 are hereby incorporated by reference.

[0095] In some embodiments, an mRNA comprising an ORF encoding an RNA-guided DNA binding agent, such as a Cas nuclease, is provided, used, or administered.

### B. Modified gRNAs and mRNAs

[0096] In some embodiments, the gRNA is chemically modified. A gRNA comprising one or more modified nucleosides or nucleotides is called a “modified” gRNA or “chemically modified” gRNA, to describe the presence of one or more non-naturally and/or naturally occurring components or configurations that are used instead of or in addition to the canonical A, G, C, and U residues. In some embodiments, a modified gRNA is synthesized with a non-canonical nucleoside or nucleotide, is here called “modified.” Modified nucleosides and nucleotides can include one or more of: (i) alteration, e.g., replacement, of one or both of the non-linking phosphate oxygens and/or of one or more of the linking phosphate oxygens in the phosphodiester backbone linkage (an exemplary backbone modification); (ii) alteration, e.g., replacement, of a constituent of the ribose sugar, e.g., of the 2′ hydroxyl on the ribose sugar (an exemplary sugar modification); (iii) wholesale replacement of the phosphate moiety with “dephospho” linkers (an exemplary backbone modification); (iv) modification or replacement of a naturally occurring nucleobase, including with a non-canonical nucleobase (an exemplary base modification); (v) replacement or modification of the ribose-phosphate backbone (an exemplary backbone modification); (vi) modification of the 3′ end or 5′ end of the oligonucleotide, e.g., removal, modification or replacement of a terminal phosphate group or conjugation of a moiety, cap or linker (such 3′ or 5′ cap modifications may comprise a sugar and/or backbone modification); and (vii) modification or replacement of the sugar (an exemplary sugar modification).

[0097] Chemical modifications such as those listed above can be combined to provide modified gRNAs and/or mRNAs comprising nucleosides and nucleotides (collectively “residues”) that can have two, three, four, or more modifications. For example, a modified residue can have a modified sugar and a modified nucleobase. In some embodiments, every base of a gRNA is modified, e.g., all bases have a modified phosphate group, such as a phosphorothioate group. In certain embodiments, all, or substantially all, of the phosphate groups of an gRNA molecule are replaced with phosphorothioate groups. In some embodiments, modified gRNAs comprise at least one modified residue at or near the 5′ end of the RNA. In some embodiments, modified gRNAs comprise at least one modified residue at or near the 3′ end of the RNA. Certain gRNAs comprise at least one modified residue at or near the 5′ end and 3′ end of the RNA.

[0098] In some embodiments, the gRNA comprises one, two, three or more modified residues. In some embodiments, at least 5% (e.g., at least 5%, at least 10%, at least 15%, at least 20%, at least 25%, at least 30%, at least 35%, at least 40%, at least 45%, at least 50%, at least 55%, at least 60%, at least 65%, at least 70%, at least 75%, at least 80%, at least 85%, at least 90%, at least 95%, or 100%) of the positions in a modified gRNA are modified nucleosides or nucleotides.

[0099] Unmodified nucleic acids can be prone to degradation by, e.g., intracellular nucleases or those found in serum. For example, nucleases can hydrolyze nucleic acid phosphodiester bonds. Accordingly, in one aspect the gRNAs described herein can contain one or more modified nucleosides or nucleotides, e.g., to introduce stability toward intracellular or serum-based nucleases. In some embodiments, the modified gRNA molecules described herein can exhibit a reduced innate immune response when introduced into a population of cells, both in vivo and ex vivo. The term “innate immune response” includes a cellular response to exogenous nucleic acids, including single stranded nucleic acids, which involves the induction of cytokine expression and release, particularly the interferons, and cell death.

[0100] In some embodiments of a backbone modification, the phosphate group of a modified residue can be modified by replacing one or more of the oxygens with a different substituent. Further, the modified residue, e.g., modified residue present in a modified nucleic acid, can include the wholesale replacement of an unmodified phosphate moiety with a modified phosphate group as described herein. In some embodiments, the backbone modification of the phosphate backbone can include alterations that result in either an uncharged linker or a charged linker with unsymmetrical charge distribution.

[0101] Examples of modified phosphate groups include, phosphorothioate, phosphoroselenates, borano phosphates, borano phosphate esters, hydrogen phosphonates, phosphoroamidates, alkyl or aryl phosphonates and phosphotriesters. The phosphorous atom in an unmodified phosphate group is achiral. However, replacement of one of the nonbridging oxygens with one of the above atoms or groups of atoms can render the phosphorous atom chiral. The stereogenic phosphorous atom can possess either the “R” configuration (herein Rp) or the “S” configuration (herein Sp). The backbone can also be modified by replacement of a bridging oxygen, (i.e., the oxygen that links the phosphate to the nucleoside), with nitrogen (bridged phosphoroamidates), sulfur (bridged phosphorothioates) and carbon (bridged methylenephosphonates). The replacement can occur at either linking oxygen or at both of the linking oxygens.

[0102] The phosphate group can be replaced by non-phosphorus containing connectors in certain backbone modifications. In some embodiments, the charged phosphate group can be replaced by a neutral moiety. Examples of moieties which can replace the phosphate group can include, without limitation, e.g., methyl phosphonate, hydroxylamino, siloxane, carbonate, carboxymethyl, carbamate, amide, thioether, ethylene oxide linker, sulfonate, sulfonamide, thioformacetal, formacetal, oxime, methyleneimino, methylenemethylimino, methylenehydrazo, methylenedimethylhydrazo and methyleneoxymethylimino.

[0103] Scaffolds that can mimic nucleic acids can also be constructed wherein the phosphate linker and ribose sugar are replaced by nuclease resistant nucleoside or nucleotide surrogates. Such modifications may comprise backbone and sugar modifications. In some embodiments, the nucleobases can be tethered by a surrogate backbone. Examples can include, without limitation, the morpholino, cyclobutyl, pyrrolidine and peptide nucleic acid (PNA) nucleoside surrogates.

[0104] The modified nucleosides and modified nucleotides can include one or more modifications to the sugar group, i.e. at sugar modification. For example, the 2′ hydroxyl group (OH) can be modified, e.g. replaced with a number of different “oxy” or “deoxy” substituents. In some embodiments, modifications to the 2′ hydroxyl group can enhance the stability of the nucleic acid since the hydroxyl can no longer be deprotonated to form a 2′-alkoxide ion.

[0105] Examples of 2′ hydroxyl group modifications can include alkoxy or aryloxy (OR, wherein “R” can be, e.g., alkyl, cycloalkyl, aryl, aralkyl, heteroaryl or a sugar); polyethyleneglycols (PEG), O(CH₂CH₂O)ₙCH₂CH₂OR wherein R can be, e.g., H or optionally substituted alkyl, and n can be an integer from 0 to 20 (e.g., from 0 to 4, from 0 to 8, from 0 to 10, from 0 to 16, from 1 to 4, from 1 to 8, from 1 to 10, from 1 to 16, from 1 to 20, from 2 to 4, from 2 to 8, from 2 to 10, from 2 to 16, from 2 to 20, from 4 to 8, from 4 to 10, from 4 to 16, and from 4 to 20). In some embodiments, the 2′ hydroxyl group modification can be 2′-O-Me. In some embodiments, the 2′ hydroxyl group modification can be a 2′-fluoro modification, which replaces the 2′ hydroxyl group with a fluoride. In some embodiments, the 2′ hydroxyl group modification can be a 2′-H, which replaces the 2′ hydroxyl group with a hydrogen. In some embodiments, the 2′ hydroxyl group modification can include “locked” nucleic acids (LNA) in which the 2′ hydroxyl can be connected, e.g., by a C₁₋₆ alkylene or C₁₋₆ heteroalkylene bridge, to the 4′ carbon of the same ribose sugar, where exemplary bridges can include methylene, propylene, ether, or amino bridges; O-amino (wherein amino can be, e.g., NH₂; alkylamino, dialkylamino, heterocyclyl, arylamino, diarylamino, heteroarylamino, or diheteroarylamino, ethylenediamine, or polyamino) and aminoalkoxy, O(CH₂)ₙ-amino, (wherein amino can be, e.g., NH₂; alkylamino, dialkylamino, heterocyclyl, arylamino, diarylamino, heteroarylamino, or diheteroarylamino, ethylenediamine, or polyamino). In some embodiments, the 2′ hydroxyl group modification can include “unlocked” nucleic acids (UNA) in which the ribose ring lacks the C2′—C3′ bond. In some embodiments, the 2′ hydroxyl group modification can include the methoxyethyl group (MOE), (OCH₂CH₂OCH₃, e.g., a PEG derivative).

[0106] “Deoxy” 2′ modifications can include hydrogen (i.e. deoxyribose sugars, e.g., at the overhang portions of partially dsRNA); halo (e.g., bromo, chloro, fluoro, or iodo); amino (wherein amino can be, e.g., NH₂; alkylamino, dialkylamino, heterocyclyl, arylamino, diarylamino, heteroarylamino, diheteroarylamino, or amino acid); NH(CH₂CH₂NH)ₙCH₂CH₂— amino (wherein amino can be, e.g., as described herein), —NHC(O) R (wherein R can be, e.g., alkyl, cycloalkyl, aryl, aralkyl, heteroaryl or sugar), cyano; mercapto; alkyl-thio-alkyl; thioalkoxy; and alkyl, cycloalkyl, aryl, alkenyl and alkynyl, which may be optionally substituted with e.g., an amino as described herein.

[0107] The sugar modification can comprise a sugar group which may also contain one or more carbons that possess the opposite stereochemical configuration than that of the corresponding carbon in ribose. Thus, a modified nucleic acid can include nucleotides containing e.g., arabinose, as the sugar. The modified nucleic acids can also include abasic sugars. These abasic sugars can also be further modified at one or more of the constituent sugar atoms. The modified nucleic acids can also include one or more sugars that are in the L form, e.g. L-nucleosides.

[0108] The modified nucleosides and modified nucleotides described herein, which can be incorporated into a modified nucleic acid, can include a modified base, also called a nucleobase. Examples of nucleobases include, but are not limited to, adenine (A), guanine (G), cytosine (C), and uracil (U). These nucleobases can be modified or wholly replaced to provide modified residues that can be incorporated into modified nucleic acids. The nucleobase of the nucleotide can be independently selected from a purine, a pyrimidine, a purine analog, or pyrimidine analog. In some embodiments, the nucleobase can include, for example, naturally-occurring and synthetic derivatives of a base.

[0109] In embodiments employing a dual guide RNA, each of the crRNA and the tracr RNA can contain modifications. Such modifications may be at one or both ends of the crRNA and/or tracr RNA. In embodiments comprising an sgRNA, one or more residues at one or both ends of the sgRNA may be chemically modified, and/or internal nucleosides may be modified, and/or the entire sgRNA may be chemically modified. Certain embodiments comprise a 5′ end modification. Certain embodiments comprise a 3′ end modification.

[0110] In some embodiments, the guide RNAs disclosed herein comprise one of the modification patterns disclosed in WO2018/107028 A1, filed Dec. 8, 2017, titled “Chemically Modified Guide RNAs,” the contents of which are hereby incorporated by reference in their entirety. In some embodiments, the guide RNAs disclosed herein comprise one of the structures/modification patterns disclosed in US20170114334, the contents of which are hereby incorporated by reference in their entirety. In some embodiments, the guide RNAs disclosed herein comprise one of the structures/modification patterns disclosed in WO2017/136794, the contents of which are hereby incorporated by reference in their entirety.

[0111] In some embodiments, the sgRNA of the present disclosure comprises the modification patterns shown below in Table 2. “Full Sequence” in Table 2 refers to an sgRNA sequence for each of the guides listed in Table 1. “Full Sequence Modified” shows a modification pattern for each sgRNA.

TABLE 2
sgRNA and modification patterns to sgRNA of human albumin guide sequences

| | | SEQ | | SEQ |
|---|---|---|---|---|
| Guide | | ID | | ID |
| ID | Full Sequence | NO: | Full Sequence Modified | NO: |
| G009844 | GAGCAACCUCACUCUUGUCUGUU | 34 | mG*mA*mG*CAACCUCACUCU | 66 |
| | UUAGAGCUAGAAAUAGCAAGUUA | | UGUCUGUUUUAGAmGmCmUm | |
| | AAAUAAGGCUAGUCCGUUAUCAA | | AmGmAmAmAmUmAmGmCAAG | |
| | CUUGAAAAAGUGGCACCGAGUCG | | UUAAAAUAAGGCUAGUCCGUU | |
| | GUGCUUUU | | AUCAmAmCmUmUmGmAmAmA | |
| | | | mAmAmGmUmGmGmCmAmCmC | |
| | | | mGmAmGmUmCmGmGmUmGmC | |
| | | | mU*mU*mU*mU | |
| G009851 | AUGCAUUUGUUUCAAAAUAUGUU | 35 | mA*mU*mG*CAUUUGUUUCAA | 67 |
| | UUAGAGCUAGAAAUAGCAAGUUA | | AAUAUGUUUUAGAmGmCmUm | |
| | AAAUAAGGCUAGUCCGUUAUCAA | | AmGmAmAmAmUmAmGmCAAG | |
| | CUUGAAAAAGUGGCACCGAGUCG | | UUAAAAUAAGGCUAGUCCGUU | |
| | GUGCUUUU | | AUCAmAmCmUmUmGmAmAmA | |
| | | | mAmAmGmUmGmGmCmAmCmC | |
| | | | mGmAmGmUmCmGmGmUmGmC | |
| | | | mU*mU*mU*mU | |
| G009852 | UGCAUUUGUUUCAAAAUAUUGUU | 36 | mU*mG*mC*AUUUGUUUCAAA | 68 |
| | UUAGAGCUAGAAAUAGCAAGUUA | | AUAUUGUUUUAGAmGmCmUm | |
| | AAAUAAGGCUAGUCCGUUAUCAA | | AmGmAmAmAmUmAmGmCAAG | |
| | CUUGAAAAAGUGGCACCGAGUCG | | UUAAAAUAAGGCUAGUCCGUU | |
| | GUGCUUUU | | AUCAmAmCmUmUmGmAmAmA | |
| | | | mAmAmGmUmGmGmCmAmCmC | |
| | | | mGmAmGmUmCmGmGmUmGmC | |
| | | | mU*mU*mU*mU | |
| G009857 | AUUUAUGAGAUCAACAGCACGUU | 37 | mA*mU*mU*UAUGAGAUCAAC | 69 |
| | UUAGAGCUAGAAAUAGCAAGUUA | | AGCACGUUUUAGAmGmCmUm | |
| | AAAUAAGGCUAGUCCGUUAUCAA | | AmGmAmAmAmUmAmGmCAAG | |
| | CUUGAAAAAGUGGCACCGAGUCG | | UUAAAAUAAGGCUAGUCCGUU | |
| | GUGCUUUU | | AUCAmAmCmUmUmGmAmAmA | |
| | | | mAmAmGmUmGmGmCmAmCmC | |
| | | | mGmAmGmUmCmGmGmUmGmC | |
| | | | mU*mU*mU*mU | |
| G009858 | GAUCAACAGCACAGGUUUUGGUU | 38 | mG*mA*mU*CAACAGCACAGG | 70 |
| | UUAGAGCUAGAAAUAGCAAGUUA | | UUUUGGUUUUAGAmGmCmUm | |
| | AAAUAAGGCUAGUCCGUUAUCAA | | AmGmAmAmAmUmAmGmCAAG | |
| | CUUGAAAAAGUGGCACCGAGUCG | | UUAAAAUAAGGCUAGUCCGUU | |
| | GUGCUUUU | | AUCAmAmCmUmUmGmAmAmA | |
| | | | mAmAmGmUmGmGmCmAmCmC | |
| | | | mGmAmGmUmCmGmGmUmGmC | |
| | | | mU*mU*mU*mU | |
| G009859 | UUAAAUAAAGCAUAGUGCAAGUU | 39 | mU*mU*mA*AAUAAAGCAUAG | 71 |
| | UUAGAGCUAGAAAUAGCAAGUUA | | UGCAAGUUUUAGAmGmCmUm | |
| | AAAUAAGGCUAGUCCGUUAUCAA | | AmGmAmAmAmUmAmGmCAAG | |
| | CUUGAAAAAGUGGCACCGAGUCG | | UUAAAAUAAGGCUAGUCCGUU | |
| | GUGCUUUU | | AUCAmAmCmUmUmGmAmAmA | |
| | | | mAmAmGmUmGmGmCmAmCmC | |
| | | | mGmAmGmUmCmGmGmUmGmC | |
| | | | mU*mU*mU*mU | |
| G009860 | UAAAGCAUAGUGCAAUGGAUGUU | 40 | mU*mA*mA*AGCAUAGUGCAA | 72 |
| | UUAGAGCUAGAAAUAGCAAGUUA | | UGGAUGUUUUAGAmGmCmUm | |
| | AAAUAAGGCUAGUCCGUUAUCAA | | AmGmAmAmAmUmAmGmCAAG | |
| | CUUGAAAAAGUGGCACCGAGUCG | | UUAAAAUAAGGCUAGUCCGUU | |
| | GUGCUUUU | | AUCAmAmCmUmUmGmAmAmA | |
| | | | mAmAmGmUmGmGmCmAmCmC | |
| | | | mGmAmGmUmCmGmGmUmGmC | |
| | | | mU*mU*mU*mU | |
| G009861 | UAGUGCAAUGGAUAGGUCUUGUU | 41 | mU*mA*mG*UGCAAUGGAUAG | 73 |
| | UUAGAGCUAGAAAUAGCAAGUUA | | GUCUUGUUUUAGAmGmCmUm | |
| | AAAUAAGGCUAGUCCGUUAUCAA | | AmGmAmAmAmUmAmGmCAAG | |
| | CUUGAAAAAGUGGCACCGAGUCG | | UUAAAAUAAGGCUAGUCCGUU | |
| | GUGCUUUU | | AUCAmAmCmUmUmGmAmAmA | |
| | | | mAmAmGmUmGmGmCmAmCmC | |
| | | | mGmAmGmUmCmGmGmUmGmC | |
| | | | mU*mU*mU*mU | |
| G009866 | UACUAAAACUUUAUUUUACUGUU | 42 | mU*mA*mC*UAAAACUUUAUU | 74 |
| | UUAGAGCUAGAAAUAGCAAGUUA | | UUACUGUUUUAGAmGmCmUm | |
| | AAAUAAGGCUAGUCCGUUAUCAA | | AmGmAmAmAmUmAmGmCAAG | |
| | CUUGAAAAAGUGGCACCGAGUCG | | UUAAAAUAAGGCUAGUCCGUU | |
| | GUGCUUUU | | AUCAmAmCmUmUmGmAmAmA | |
| | | | mAmAmGmUmGmGmCmAmCmC | |
| | | | mGmAmGmUmCmGmGmUmGmC | |
| | | | mU*mU*mU*mU | |
| G009867 | AAAGUUGAACAAUAGAAAAAGUU | 43 | mA*mA*mA*GUUGAACAAUAG | 75 |
| | UUAGAGCUAGAAAUAGCAAGUUA | | AAAAAGUUUUAGAmGmCmUm | |
| | AAAUAAGGCUAGUCCGUUAUCAA | | AmGmAmAmAmUmAmGmCAAG | |
| | CUUGAAAAAGUGGCACCGAGUCG | | UUAAAAUAAGGCUAGUCCGUU | |
| | GUGCUUUU | | AUCAmAmCmUmUmGmAmAmA | |
| | | | mAmAmGmUmGmGmCmAmCmC | |
| | | | mGmAmGmUmCmGmGmUmGmC | |
| | | | mU*mU*mU*mU | |
| G009868 | AAUGCAUAAUCUAAGUCAAAGUU | 44 | mA*mA*mU*GCAUAAUCUAAG | 76 |
| | UUAGAGCUAGAAAUAGCAAGUUA | | UCAAAGUUUUAGAmGmCmUm | |
| | AAAUAAGGCUAGUCCGUUAUCAA | | AmGmAmAmAmUmAmGmCAAG | |
| | CUUGAAAAAGUGGCACCGAGUCG | | UUAAAAUAAGGCUAGUCCGUU | |
| | GUGCUUUU | | AUCAmAmCmUmUmGmAmAmA | |
| | | | mAmAmGmUmGmGmCmAmCmC | |
| | | | mGmAmGmUmCmGmGmUmGmC | |
| | | | mU*mU*mU*mU | |
| G009874 | UAAUAAAAUUCAAACAUCCUGUU | 45 | mU*mA*mA*UAAAAUUCAAAC | 77 |
| | UUAGAGCUAGAAAUAGCAAGUUA | | AUCCUGUUUUAGAmGmCmUm | |
| | AAAUAAGGCUAGUCCGUUAUCAA | | AmGmAmAmAmUmAmGmCAAG | |
| | CUUGAAAAAGUGGCACCGAGUCG | | UUAAAAUAAGGCUAGUCCGUU | |
| | GUGCUUUU | | AUCAmAmCmUmUmGmAmAmA | |
| | | | mAmAmGmUmGmGmCmAmCmC | |
| | | | mGmAmGmUmCmGmGmUmGmC | |
| | | | mU*mU*mU*mU | |
| G012747 | GCAUCUUUAAAGAAUUAUUUGUU | 46 | mG*mC*mA*UCUUUAAAGAAU | 78 |
| | UUAGAGCUAGAAAUAGCAAGUUA | | UAUUUGUUUUAGAmGmCmUm | |
| | AAAUAAGGCUAGUCCGUUAUCAA | | AmGmAmAmAmUmAmGmCAAG | |
| | CUUGAAAAAGUGGCACCGAGUCG | | UUAAAAUAAGGCUAGUCCGUU | |
| | GUGCUUUU | | AUCAmAmCmUmUmGmAmAmA | |
| | | | mAmAmGmUmGmGmCmAmCmC | |
| | | | mGmAmGmUmCmGmGmUmGmC | |
| | | | mU*mU*mU*mU | |
| G012748 | UUUGGCAUUUAUUUCUAAAAGUU | 47 | mU*mU*mU*GGCAUUUAUUUC | 79 |
| | UUAGAGCUAGAAAUAGCAAGUUA | | UAAAAGUUUUAGAmGmCmUm | |
| | AAAUAAGGCUAGUCCGUUAUCAA | | AmGmAmAmAmUmAmGmCAAG | |
| | CUUGAAAAAGUGGCACCGAGUCG | | UUAAAAUAAGGCUAGUCCGUU | |
| | GUGCUUUU | | AUCAmAmCmUmUmGmAmAmA | |
| | | | mAmAmGmUmGmGmCmAmCmC | |
| | | | mGmAmGmUmCmGmGmUmGmC | |
| | | | mU*mU*mU*mU | |
| G012749 | UGUAUUUGUGAAGUCUUACAGUU | 48 | mU*mG*mU*AUUUGUGAAGUC | 80 |
| | UUAGAGCUAGAAAUAGCAAGUUA | | UUACAGUUUUAGAmGmCmUm | |
| | AAAUAAGGCUAGUCCGUUAUCAA | | AmGmAmAmAmUmAmGmCAAG | |
| | CUUGAAAAAGUGGCACCGAGUCG | | UUAAAAUAAGGCUAGUCCGUU | |
| | GUGCUUUU | | AUCAmAmCmUmUmGmAmAmA | |
| | | | mAmAmGmUmGmGmCmAmCmC | |
| | | | mGmAmGmUmCmGmGmUmGmC | |
| | | | mU*mU*mU*mU | |
| G012750 | UCCUAGGUAAAAAAAAAAAAGUU | 49 | mU*mC*mC*UAGGUAAAAAAA | 81 |
| | UUAGAGCUAGAAAUAGCAAGUUA | | AAAAAGUUUUAGAmGmCmUm | |
| | AAAUAAGGCUAGUCCGUUAUCAA | | AmGmAmAmAmUmAmGmCAAG | |
| | | | UUAAAAUAAGGCUAGUCCGUU | |
| | CUUGAAAAAGUGGCACCGAGUCG | | AUCAmAmCmUmUmGmAmAmA | |
| | GUGCUUUU | | mAmAmGmUmGmGmCmAmCmC | |
| | | | mGmAmGmUmCmGmGmUmGmC | |
| | | | mU*mU*mU*mU | |
| G012751 | UAAUUUUCUUUUGCGCACUAGUU | 50 | mU*mA*mA*UUUUCUUUUGCG | 82 |
| | UUAGAGCUAGAAAUAGCAAGUUA | | CACUAGUUUUAGAmGmCmUm | |
| | AAAUAAGGCUAGUCCGUUAUCAA | | AmGmAmAmAmUmAmGmCAAG | |
| | CUUGAAAAAGUGGCACCGAGUCG | | UUAAAAUAAGGCUAGUCCGUU | |
| | GUGCUUUU | | AUCAmAmCmUmUmGmAmAmA | |
| | | | mAmAmGmUmGmGmCmAmCmC | |
| | | | mGmAmGmUmCmGmGmUmGmC | |
| | | | mU*mU*mU*mU | |
| G012752 | UGACUGAAACUUCACAGAAUGUU | 51 | mU*mG*mA*CUGAAACUUCAC | 83 |
| | UUAGAGCUAGAAAUAGCAAGUUA | | AGAAUGUUUUAGAmGmCmUm | |
| | AAAUAAGGCUAGUCCGUUAUCAA | | AmGmAmAmAmUmAmGmCAAG | |
| | CUUGAAAAAGUGGCACCGAGUCG | | UUAAAAUAAGGCUAGUCCGUU | |
| | GUGCUUUU | | AUCAmAmCmUmUmGmAmAmA | |
| | | | mAmAmGmUmGmGmCmAmCmC | |
| | | | mGmAmGmUmCmGmGmUmGmC | |
| | | | mU*mU*mU*mU | |
| G012753 | GACUGAAACUUCACAGAAUAGUU | 52 | mG*mA*mC*UGAAACUUCACA | 84 |
| | UUAGAGCUAGAAAUAGCAAGUUA | | GAAUAGUUUUAGAmGmCmUm | |
| | AAAUAAGGCUAGUCCGUUAUCAA | | AmGmAmAmAmUmAmGmCAAG | |
| | CUUGAAAAAGUGGCACCGAGUCG | | UUAAAAUAAGGCUAGUCCGUU | |
| | GUGCUUUU | | AUCAmAmCmUmUmGmAmAmA | |
| | | | mAmAmGmUmGmGmCmAmCmC | |
| | | | mGmAmGmUmCmGmGmUmGmC | |
| | | | mU*mU*mU*mU | |
| G012754 | UUCAUUUUAGUCUGUCUUCUGUU | 53 | mU*mU*mC*AUUUUAGUCUGU | 85 |
| | UUAGAGCUAGAAAUAGCAAGUUA | | CUUCUGUUUUAGAmGmCmUm | |
| | AAAUAAGGCUAGUCCGUUAUCAA | | AmGmAmAmAmUmAmGmCAAG | |
| | CUUGAAAAAGUGGCACCGAGUCG | | UUAAAAUAAGGCUAGUCCGUU | |
| | GUGCUUUU | | AUCAmAmCmUmUmGmAmAmA | |
| | | | mAmAmGmUmGmGmCmAmCmC | |
| | | | mGmAmGmUmCmGmGmUmGmC | |
| | | | mU*mU*mU*mU | |
| G012755 | AUUAUCUAAGUUUGAAUAUAGUU | 54 | mA*mU*mU*AUCUAAGUUUGA | 86 |
| | UUAGAGCUAGAAAUAGCAAGUUA | | AUAUAGUUUUAGAmGmCmUm | |
| | AAAUAAGGCUAGUCCGUUAUCAA | | AmGmAmAmAmUmAmGmCAAG | |
| | CUUGAAAAAGUGGCACCGAGUCG | | UUAAAAUAAGGCUAGUCCGUU | |
| | GUGCUUUU | | AUCAmAmCmUmUmGmAmAmA | |
| | | | mAmAmGmUmGmGmCmAmCmC | |
| | | | mGmAmGmUmCmGmGmUmGmC | |
| | | | mU*mU*mU*mU | |
| G012756 | AAUUUUUAAAAUAGUAUUCUGUU | 55 | mA*mA*mU*UUUUAAAAUAGU | 87 |
| | UUAGAGCUAGAAAUAGCAAGUUA | | AUUCUGUUUUAGAmGmCmUm | |
| | AAAUAAGGCUAGUCCGUUAUCAA | | AmGmAmAmAmUmAmGmCAAG | |
| | CUUGAAAAAGUGGCACCGAGUCG | | UUAAAAUAAGGCUAGUCCGUU | |
| | GUGCUUUU | | AUCAmAmCmUmUmGmAmAmA | |
| | | | mAmAmGmUmGmGmCmAmCmC | |
| | | | mGmAmGmUmCmGmGmUmGmC | |
| | | | mU*mU*mU*mU | |
| G012757 | UGAAUUAUUCUUCUGUUUAAGUU | 56 | mU*mG*mA*AUUAUUCUUCUG | 88 |
| | UUAGAGCUAGAAAUAGCAAGUUA | | UUUAAGUUUUAGAmGmCmUm | |
| | AAAUAAGGCUAGUCCGUUAUCAA | | AmGmAmAmAmUmAmGmCAAG | |
| | CUUGAAAAAGUGGCACCGAGUCG | | UUAAAAUAAGGCUAGUCCGUU | |
| | GUGCUUUU | | AUCAmAmCmUmUmGmAmAmA | |
| | | | mAmAmGmUmGmGmCmAmCmC | |
| | | | mGmAmGmUmCmGmGmUmGmC | |
| | | | mU*mU*mU*mU | |
| G012758 | AUCAUCCUGAGUUUUUCUGUGUU | 57 | mA*mU*mC*AUCCUGAGUUUU | 89 |
| | UUAGAGCUAGAAAUAGCAAGUUA | | UCUGUGUUUUAGAmGmCmUm | |
| | AAAUAAGGCUAGUCCGUUAUCAA | | AmGmAmAmAmUmAmGmCAAG | |
| | CUUGAAAAAGUGGCACCGAGUCG | | UUAAAAUAAGGCUAGUCCGUU | |
| | GUGCUUUU | | AUCAmAmCmUmUmGmAmAmA | |
| | | | mAmAmGmUmGmGmCmAmCmC | |
| | | | mGmAmGmUmCmGmGmUmGmC | |
| | | | mU*mU*mU*mU | |
| G012759 | UUACUAAAACUUUAUUUUACGUU | 58 | mU*mU*mA*CUAAAACUUUAU | 90 |
| | UUAGAGCUAGAAAUAGCAAGUUA | | UUUACGUUUUAGAmGmCmUm | |
| | AAAUAAGGCUAGUCCGUUAUCAA | | AmGmAmAmAmUmAmGmCAAG | |
| | CUUGAAAAAGUGGCACCGAGUCG | | UUAAAAUAAGGCUAGUCCGUU | |
| | GUGCUUUU | | AUCAmAmCmUmUmGmAmAmA | |
| | | | mAmAmGmUmGmGmCmAmCmC | |
| | | | mGmAmGmUmCmGmGmUmGmC | |
| | | | mU*mU*mU*mU | |
| G012760 | ACCUUUUUUUUUUUUUACCUGUU | 59 | mA*mC*mC*UUUUUUUUUUUU | 91 |
| | UUAGAGCUAGAAAUAGCAAGUUA | | UACCUGUUUUAGAmGmCmUm | |
| | AAAUAAGGCUAGUCCGUUAUCAA | | AmGmAmAmAmUmAmGmCAAG | |
| | CUUGAAAAAGUGGCACCGAGUCG | | UUAAAAUAAGGCUAGUCCGUU | |
| | GUGCUUUU | | AUCAmAmCmUmUmGmAmAmA | |
| | | | mAmAmGmUmGmGmCmAmCmC | |
| | | | mGmAmGmUmCmGmGmUmGmC | |
| | | | mU*mU*mU*mU | |
| G012761 | AGUGCAAUGGAUAGGUCUUUGUU | 60 | mA*mG*mU*GCAAUGGAUAGG | 92 |
| | UUAGAGCUAGAAAUAGCAAGUUA | | UCUUUGUUUUAGAmGmCmUm | |
| | AAAUAAGGCUAGUCCGUUAUCAA | | AmGmAmAmAmUmAmGmCAAG | |
| | CUUGAAAAAGUGGCACCGAGUCG | | UUAAAAUAAGGCUAGUCCGUU | |
| | GUGCUUUU | | AUCAmAmCmUmUmGmAmAmA | |
| | | | mAmAmGmUmGmGmCmAmCmC | |
| | | | mGmAmGmUmCmGmGmUmGmC | |
| | | | mU*mU*mU*mU | |
| G012762 | UGAUUCCUACAGAAAAACUCGUU | 61 | mU*mG*mA*UUCCUACAGAAA | 93 |
| | UUAGAGCUAGAAAUAGCAAGUUA | | AACUCGUUUUAGAmGmCmUm | |
| | AAAUAAGGCUAGUCCGUUAUCAA | | AmGmAmAmAmUmAmGmCAAG | |
| | CUUGAAAAAGUGGCACCGAGUCG | | UUAAAAUAAGGCUAGUCCGUU | |
| | GUGCUUUU | | AUCAmAmCmUmUmGmAmAmA | |
| | | | mAmAmGmUmGmGmCmAmCmC | |
| | | | mGmAmGmUmCmGmGmUmGmC | |
| | | | mU*mU*mU*mU | |
| G012763 | UGGGCAAGGGAAGAAAAAAAGUU | 62 | mU*mG*mG*GCAAGGGAAGAA | 94 |
| | UUAGAGCUAGAAAUAGCAAGUUA | | AAAAAGUUUUAGAmGmCmUm | |
| | AAAUAAGGCUAGUCCGUUAUCAA | | AmGmAmAmAmUmAmGmCAAG | |
| | CUUGAAAAAGUGGCACCGAGUCG | | UUAAAAUAAGGCUAGUCCGUU | |
| | GUGCUUUU | | AUCAmAmCmUmUmGmAmAmA | |
| | | | mAmAmGmUmGmGmCmAmCmC | |
| | | | mGmAmGmUmCmGmGmUmGmC | |
| | | | mU*mU*mU*mU | |
| G012764 | CCUCACUCUUGUCUGGGCAAGUU | 63 | mC*mC*mU*CACUCUUGUCUGG | 95 |
| | UUAGAGCUAGAAAUAGCAAGUUA | | GCAAGUUUUAGAmGmCmUmA | |
| | AAAUAAGGCUAGUCCGUUAUCAA | | mGmAmAmAmUmAmGmCAAGU | |
| | CUUGAAAAAGUGGCACCGAGUCG | | UAAAAUAAGGCUAGUCCGUUA | |
| | GUGCUUUU | | UCAmAmCmUmUmGmAmAmAm | |
| | | | AmAmGmUmGmGmCmAmCmCm | |
| | | | GmAmGmUmCmGmGmUmGmCm | |
| | | | U*mU*mU*mU | |
| G012765 | ACCUCACUCUUGUCUGGGCAGUU | 64 | mA*mC*mC*UCACUCUUGUCUG | 96 |
| | UUAGAGCUAGAAAUAGCAAGUUA | | GGCAGUUUUAGAmGmCmUmA | |
| | AAAUAAGGCUAGUCCGUUAUCAA | | mGmAmAmAmUmAmGmCAAGU | |
| | CUUGAAAAAGUGGCACCGAGUCG | | UAAAAUAAGGCUAGUCCGUUA | |
| | GUGCUUUU | | UCAmAmCmUmUmGmAmAmAm | |
| | | | AmAmGmUmGmGmCmAmCmCm | |
| | | | GmAmGmUmCmGmGmUmGmCm | |
| | | | U*mU*mU*mU | |
| G012766 | UGAGCAACCUCACUCUUGUCGUU | 65 | mU*mG*mA*GCAACCUCACUCU | 97 |
| | UUAGAGCUAGAAAUAGCAAGUUA | | UGUCGUUUUAGAmGmCmUmA | |
| | AAAUAAGGCUAGUCCGUUAUCAA | | mGmAmAmAmUmAmGmCAAGU | |
| | CUUGAAAAAGUGGCACCGAGUCG | | UAAAAUAAGGCUAGUCCGUUA | |
| | GUGCUUUU | | UCAmAmCmUmUmGmAmAmAm | |
| | | | AmAmGmUmGmGmCmAmCmCm | |
| | | | GmAmGmUmCmGmGmUmGmCm | |
| | | | U*mU*mU*mU | |

[0112] In some embodiments, the modified sgRNA comprises the following sequence: mN*mN*mN*NNNNNNNNNNNNNNNNNGUUUUAGAmGmCmUmAmGmAmAmAmU mAmGmCAAGUUAAAAUAAGGCUAGUCCGUUAUCAmAmCmUmUmGmAmAmAm AmAmGmUmGmGmCmAmCmCmGmAmGmUmCmGmGmUmGmCmU*mU*mU*mU (SEQ ID NO: 350), where “N” may be any natural or non-natural nucleotide, and wherein the totality of N's comprise an albumin intron 1 guide sequence as described in Table 1. For example, encompassed herein is SEQ ID NO: 350, which omits the N's from SEQ ID NO: 350 but includes the modified conserved portion of a gRNA.

[0113] Any of the modifications described below may be present in the gRNAs and mRNAs described herein.

[0114] The terms “mA,” “mC,” “mU,” or “mG” may be used to denote a nucleotide that has been modified with 2′-O-Me.

[0115] Modification of 2′-O-methyl can be depicted as follows:

[chemical structure]

[0116] Another chemical modification that has been shown to influence nucleotide sugar rings is halogen substitution. For example, 2′-fluoro (2′-F) substitution on nucleotide sugar rings can increase oligonucleotide binding affinity and nuclease stability.

[0117] In this application, the terms “fA,” “fC,” “fU,” or “fG” may be used to denote a nucleotide that has been substituted with 2′-F.

[0118] Substitution of 2′-F can be depicted as follows:

[chemical structure]

[0119] Phosphorothioate (PS) linkage or bond refers to a bond where a sulfur is substituted for one nonbridging phosphate oxygen in a phosphodiester linkage, for example in the bonds between nucleotides bases. When phosphorothioates are used to generate oligonucleotides, the modified oligonucleotides may also be referred to as S-oligos.

[0120] A “*” may be used to depict a PS modification. In this application, the terms A*, C*, U*, or G* may be used to denote a nucleotide that is linked to the next (e.g., 3′) nucleotide with a PS bond.

[0121] In this application, the terms “mA*,” “mC*,” “mU*,” or “mG*” may be used to denote a nucleotide that has been substituted with 2′-O-Me and that is linked to the next (e.g., 3′) nucleotide with a PS bond.

[0122] The diagram below shows the substitution of S-into a nonbridging phosphate oxygen, generating a PS bond in lieu of a phosphodiester bond:

[chemical structure]

[0123] Abasic nucleotides refer to those which lack nitrogenous bases. The figure below depicts an oligonucleotide with an abasic (also known as apurinic) site that lacks a base:

[chemical structure]

[0124] Inverted bases refer to those with linkages that are inverted from the normal 5′ to 3′ linkage (i.e., either a 5′ to 5′ linkage or a 3′ to 3′ linkage). For example:

[chemical structure]

[0125] An abasic nucleotide can be attached with an inverted linkage. For example, an abasic nucleotide may be attached to the terminal 5′ nucleotide via a 5′ to 5′ linkage, or an abasic nucleotide may be attached to the terminal 3′ nucleotide via a 3′ to 3′ linkage. An inverted abasic nucleotide at either the terminal 5′ or 3′ nucleotide may also be called an inverted abasic end cap.

[0126] In some embodiments, one or more of the first three, four, or five nucleotides at the 5′ terminus, and one or more of the last three, four, or five nucleotides at the 3′ terminus are modified. In some embodiments, the modification is a 2′-O-Me, 2′-F, inverted abasic nucleotide, PS bond, or other nucleotide modification well known in the art to increase stability and/or performance.

[0127] In some embodiments, the first four nucleotides at the 5′ terminus, and the last four nucleotides at the 3′ terminus are linked with phosphorothioate (PS) bonds.

[0128] In some embodiments, the first three nucleotides at the 5′ terminus, and the last three nucleotides at the 3′ terminus comprise a 2′-O-methyl (2′-O-Me) modified nucleotide. In some embodiments, the first three nucleotides at the 5′ terminus, and the last three nucleotides at the 3′ terminus comprise a 2′-fluoro (2′-F) modified nucleotide. In some embodiments, the first three nucleotides at the 5′ terminus, and the last three nucleotides at the 3′ terminus comprise an inverted abasic nucleotide.

[0129] In some embodiments, the guide RNA comprises a modified sgRNA. In some embodiments, the sgRNA comprises the modification pattern shown in SEQ ID No: 350, where N is any natural or non-natural nucleotide, and where the totality of the N's comprise a guide sequence that directs a nuclease to a target sequence in human albumin intron 1, e.g., as shown in Table 1.

[0130] In some embodiments, the guide RNA comprises a sgRNA shown in any one of SEQ ID NOs: 34-97 or 120-163. In some embodiments, the guide RNA comprises a sgRNA shown in any one of SEQ ID NOs: 197-229. In some embodiments, the guide RNA comprises a sgRNA comprising any one of the guide sequences of SEQ ID NOs: 2-33 or 98-119 and the nucleotides of SEQ ID No: 301, wherein the nucleotides of SEQ ID NO: 301 are on the 3′ end of the guide sequence, and wherein the sgRNA may be modified as shown in Table 2 or SEQ ID NO: 350. In some embodiments, the guide RNA comprises a sgRNA comprising any one of the guide sequences of SEQ ID NOs: 2-33 or 197-229 and the nucleotides of SEQ ID NO: 301, wherein the nucleotides of SEQ ID NO: 301 are on the 3′ 10) end of the guide sequence, and wherein the sgRNA may be modified as shown in Table 2 or SEQ ID NO: 350.

[0131] As noted above, in some embodiments, a composition or formulation disclosed herein comprises an mRNA comprising an open reading frame (ORF) encoding an RNA-guided DNA binding agent, such as a Cas nuclease as described herein. In some embodiments, an mRNA comprising an ORF encoding an RNA-guided DNA binding agent, such as a Cas nuclease, is provided, used, or administered. In some embodiments, the ORF encoding an RNA-guided DNA nuclease is a “modified RNA-guided DNA binding agent ORF” or simply a “modified ORF,” which is used as shorthand to indicate that the ORF is modified.

[0132] In some embodiments, the modified ORF may comprise a modified uridine at least at one, a plurality of, or all uridine positions. In some embodiments, the modified uridine is a uridine modified at the 5 position, e.g., with a halogen, methyl, or ethyl. In some embodiments, the modified uridine is a pseudouridine modified at the 1 position, e.g., with a halogen, methyl, or ethyl. The modified uridine can be, for example, pseudouridine, N1-methyl-pseudouridine, 5-methoxyuridine, 5-iodouridine, or a combination thereof. In some embodiments, the modified uridine is 5-methoxyuridine. In some embodiments, the modified uridine is 5-iodouridine. In some embodiments, the modified uridine is pseudouridine. In some embodiments, the modified uridine is N1-methyl-pseudouridine. In some embodiments, the modified uridine is a combination of pseudouridine and N1-methyl-pseudouridine. In some embodiments, the modified uridine is a combination of pseudouridine and 5-methoxyuridine. In some embodiments, the modified uridine is a combination of N1-methyl pseudouridine and 5-methoxyuridine. In some embodiments, the modified uridine is a combination of 5-iodouridine and N1-methyl-pseudouridine. In some embodiments, the modified uridine is a combination of pseudouridine and 5-iodouridine. In some embodiments, the modified uridine is a combination of 5-iodouridine and 5-methoxyuridine.

[0133] In some embodiments, an mRNA disclosed herein comprises a 5′ cap, such as a Cap0, Cap1, or Cap2. A 5′ cap is generally a 7-methylguanine ribonucleotide (which may be further modified, as discussed below e.g. with respect to ARCA) linked through a 5′-triphosphate to the 5′ position of the first nucleotide of the 5′-to-3′ chain of the mRNA, i.e., the first cap-proximal nucleotide. In Cap0, the riboses of the first and second cap-proximal nucleotides of the mRNA both comprise a 2′-hydroxyl. In Cap1, the riboses of the first and second transcribed nucleotides of the mRNA comprise a 2′-methoxy and a 2′-hydroxyl, respectively. In Cap2, the riboses of the first and second cap-proximal nucleotides of the mRNA both comprise a 2′-methoxy. See, e.g., Katibah et al. (2014) Proc Natl Acad Sci USA 111 (33): 12025-30; Abbas et al. (2017) Proc Natl Acad Sci USA 114 (11): E2106-E2115. Most endogenous higher eukaryotic mRNAs, including mammalian mRNAs such as human mRNAs, comprise Cap1 or Cap2. Cap0 and other cap structures differing from Cap1 and Cap2 may be immunogenic in mammals, such as humans, due to recognition as “non-self” by components of the innate immune system such as IFIT-1 and IFIT-5, which can result in elevated cytokine levels including type I interferon. Components of the innate immune system such as IFIT-1 and IFIT-5 may also compete with eIF4E for binding of an mRNA with a cap other than Cap1 or Cap2, potentially inhibiting translation of the mRNA.

[0134] A cap can be included co-transcriptionally. For example, ARCA (anti-reverse cap analog; Thermo Fisher Scientific Cat. No. AM8045) is a cap analog comprising a 7-methylguanine 3′-methoxy-5′-triphosphate linked to the 5′ position of a guanine ribonucleotide which can be incorporated in vitro into a transcript at initiation. ARCA results in a Cap0 cap in which the 2′ position of the first cap-proximal nucleotide is hydroxyl. See, e.g., Stepinski et al., (2001) “Synthesis and properties of mRNAs containing the novel ‘anti-reverse’ cap analogs 7-methyl(3′-O-methyl)GpppG and 7-methyl (3′deoxy)GpppG,” RNA 7:1486-1495. The ARCA structure is shown below.

[chemical structure]

[0135] CleanCap™ AG (m7G(5′)ppp(5′)(2′OMeA)pG; TriLink Biotechnologies Cat. No. N-7113) or CleanCap™ GG (m7G (5′)ppp(5′) (2′OMeG)pG; TriLink Biotechnologies Cat. No. N-7133) can be used to provide a Cap1 structure co-transcriptionally. 3′-O-methylated versions of CleanCap™ AG and CleanCap™ GG are also available from TriLink Biotechnologies as Cat. Nos. N-7413 and N-7433, respectively. The CleanCap™ AG structure is shown below.

[chemical structure]

[0136] Alternatively, a cap can be added to an RNA post-transcriptionally. For example, Vaccinia capping enzyme is commercially available (New England Biolabs Cat. No. M2080S) and has RNA triphosphatase and guanylyltransferase activities, provided by its D1 subunit, and guanine methyltransferase, provided by its D12 subunit. As such, it can add a 7-methylguanine to an RNA, so as to give Cap0, in the presence of S-adenosyl methionine and GTP. See, e.g., Guo, P. and Moss, B. (1990) Proc. Natl. Acad. Sci. USA 87, 4023-4027; Mao, X. and Shuman, S. (1994) J. Biol. Chem. 269, 24472-24479.

[0137] In some embodiments, the mRNA further comprises a poly-adenylated (poly-A) tail. In some embodiments, the poly-A tail comprises at least 20, 30, 40, 50, 60, 70, 80, 90, or 100 adenines, optionally up to 300 adenines. In some embodiments, the poly-A tail comprises 95, 96, 97, 98, 99, or 100 adenine nucleotides.

### C. RNA-Guided DNA Binding Agent

[0138] As described herein, the guide RNAs of the present disclosure are used in conjunction with an RNA-guided DNA binding agent for inserting and expressing a heterologous (exogenous) gene within a genomic locus, such as a safe harbor site, of a host cell. The RNA-guided DNA binding agent may be a protein or a nucleic acid encoding the protein such as an mRNA. In some embodiments, the methods of the present disclosure include the use of a composition that comprises a guide RNA comprising a guide sequence from Table 1 and an RNA-guided DNA binding agent, e.g., a nuclease, such as a Cas nuclease (e.g., Cas9), to form a ribonucleoprotein complex.

[0139] In some embodiments, the RNA-guided DNA-binding agent, such as a Cas9 nuclease, has cleavase activity, which can also be referred to as double-strand endonuclease activity. In some embodiments, the RNA-guided DNA-binding agent, such as a Cas9 nuclease, has nickase activity, which can also be referred to as single-strand endonuclease activity. In some embodiments, the RNA-guided DNA-binding agent comprises a Cas nuclease. Examples of Cas nucleases include those of the type II CRISPR systems of S. pyogenes, S. aureus, and other prokaryotes (see, e.g., the list in the next paragraph), and variant or mutant (e.g., engineered, non-naturally occurring, naturally occurring, or or other variant) versions thereof. See, e.g., US2016/0312198 A1; US 2016/0312199 A1.

[0140] Non-limiting exemplary species that the Cas nuclease can be derived from include Streptococcus pyogenes, Streptococcus thermophilus, Streptococcus sp., Staphylococcus aureus, Listeria innocua, Lactobacillus gasseri, Francisella novicida, Wolinella succinogenes, Sutterella wadsworthensis, Gamma proteobacterium, Neisseria meningitidis, Campylobacter jejuni, Pasteurella multocida, Fibrobacter succinogene, Rhodospirillum rubrum, Nocardiopsis dassonvillei, Streptomyces pristinaespiralis, Streptomyces viridochromogenes, Streptomyces viridochromogenes, Streptosporangium roseum, Streptosporangium roseum, Alicyclobacillus acidocaldarius, Bacillus pseudomycoides, Bacillus selenitireducens, Exiguobacterium sibiricum, Lactobacillus delbrueckii, Lactobacillus salivarius, Lactobacillus buchneri, Treponema denticola, Microscilla marina, Burkholderiales bacterium, Polaromonas naphthalenivorans, Polaromonas sp., Crocosphaera watsonii, Cyanothece sp., Microcystis aeruginosa, Synechococcus sp., Acetohalobium arabaticum, Ammonifex degensii, Caldicelulosiruptor becscii, Candidatus Desulforudis, Clostridium botulinum, Clostridium difficile, Finegoldia magna, Natranaerobius thermophilus, Pelotomaculum thermopropionicum, Acidithiobacillus caldus, Acidithiobacillus ferrooxidans, Allochromatium vinosum, Marinobacter sp., Nitrosococcus halophilus, Nitrosococcus watsoni, Pseudoalteromonas haloplanktis, Ktedonobacter racemifer, Methanohalobium evestigatum, Anabaena variabilis, Nodularia spumigena, Nostoc sp., Arthrospira maxima, Arthrospira platensis, Arthrospira sp., Lyngbya sp., Microcoleus chthonoplastes, Oscillatoria sp., Petrotoga mobilis, Thermosipho africanus, Streptococcus pasteurianus, Neisseria cinerea, Campylobacter lari, Parvibaculum lavamentivorans, Corynebacterium diphtheria, Acidaminococcus sp., Lachnospiraceae bacterium ND2006, and Acaryochloris marina.

[0141] In some embodiments, the Cas nuclease is the Cas9 nuclease from Streptococcus pyogenes. In some embodiments, the Cas nuclease is the Cas9 nuclease from Streptococcus thermophilus. In some embodiments, the Cas nuclease is the Cas9 nuclease from Neisseria meningitidis. In some embodiments, the Cas nuclease is the Cas9 nuclease is from Staphylococcus aureus. In some embodiments, the Cas nuclease is the Cpf1 nuclease from Francisella novicida. In some embodiments, the Cas nuclease is the Cpf1 nuclease from Acidaminococcus sp. In some embodiments, the Cas nuclease is the Cpf1 nuclease from Lachnospiraceae bacterium ND2006. In further embodiments, the Cas nuclease is the Cpf1 nuclease from Francisella tularensis, Lachnospiraceae bacterium, Butyrivibrio proteoclasticus, Peregrinibacteria bacterium, Parcubacteria bacterium, Smithella, Acidaminococcus, Candidatus Methanoplasma termitum, Eubacterium eligens, Moraxella bovoculi, Leptospira inadai, Porphyromonas crevioricanis, Prevotella disiens, or Porphyromonas macacae. In certain embodiments, the Cas nuclease is a Cpf1 nuclease from an Acidaminococcus or Lachnospiraceae.

[0142] In some embodiments, the gRNA together with an RNA-guided DNA binding agent is called a ribonucleoprotein complex (RNP). In some embodiments, the RNA-guided DNA binding agent is a Cas nuclease. In some embodiments, the gRNA together with a Cas nuclease is called a Cas RNP. In some embodiments, the RNP comprises Type-I, Type-II, or Type-III components. In some embodiments, the Cas nuclease is the Cas9 protein from the Type-II CRISPR/Cas system. In some embodiment, the gRNA together with Cas9 is called a Cas9 RNP.

[0143] Wild type Cas9 has two nuclease domains: RuvC and HNH. The RuvC domain cleaves the non-target DNA strand, and the HNH domain cleaves the target strand of DNA. In some embodiments, the Cas9 protein comprises more than one RuvC domain and/or more than one HNH domain. In some embodiments, the Cas9 protein is a wild type Cas9. In each of the composition, use, and method embodiments, the Cas induces a double strand break in target DNA.

[0144] In some embodiments, chimeric Cas nucleases are used, where one domain or region of the protein is replaced by a portion of a different protein. In some embodiments, a Cas nuclease domain may be replaced with a domain from a different nuclease such as Fok1. In some embodiments, a Cas nuclease may be a modified nuclease.

[0145] In other embodiments, the Cas nuclease may be from a Type-I CRISPR/Cas system. In some embodiments, the Cas nuclease may be a component of the Cascade complex of a Type-I CRISPR/Cas system. In some embodiments, the Cas nuclease may be a Cas3 protein. In some embodiments, the Cas nuclease may be from a Type-III CRISPR/Cas system. In some embodiments, the Cas nuclease may have an RNA cleavage activity.

[0146] In some embodiments, the RNA-guided DNA-binding agent has single-strand nickase activity, i.e., can cut one DNA strand to produce a single-strand break, also known as a “nick.” In some embodiments, the RNA-guided DNA-binding agent comprises a Cas nickase. A nickase is an enzyme that creates a nick in dsDNA, i.e., cuts one strand but not the other of the DNA double helix. In some embodiments, a Cas nickase is a version of a Cas nuclease (e.g., a Cas nuclease discussed above) in which an endonucleolytic active site is inactivated, e.g., by one or more alterations (e.g., point mutations) in a catalytic domain. See, e.g., U.S. Pat. No. 8,889,356 for discussion of Cas nickases and exemplary catalytic domain alterations. In some embodiments, a Cas nickase such as a Cas9 nickase has an inactivated RuvC or HNH domain.

[0147] In some embodiments, the RNA-guided DNA-binding agent is modified to contain only one functional nuclease domain. For example, the agent protein may be modified such that one of the nuclease domains is mutated or fully or partially deleted to reduce its nucleic acid cleavage activity. In some embodiments, a nickase is used having a RuvC domain with reduced activity. In some embodiments, a nickase is used having an inactive RuvC domain. In some embodiments, a nickase is used having an HNH domain with reduced activity. In some embodiments, a nickase is used having an inactive HNH domain.

[0148] In some embodiments, a conserved amino acid within a Cas protein nuclease domain is substituted to reduce or alter nuclease activity. In some embodiments, a Cas nuclease may comprise an amino acid substitution in the RuvC or RuvC-like nuclease domain. Exemplary amino acid substitutions in the RuvC or RuvC-like nuclease domain include D10A (based on the S. pyogenes Cas9 protein). See, e.g., Zetsche et al. (2015) Cell October 22: 163 (3): 759-771. In some embodiments, the Cas nuclease may comprise an amino acid substitution in the HNH or HNH-like nuclease domain. Exemplary amino acid substitutions in the HNH or HNH-like nuclease domain include E762A, H840A, N863A, H983A, and D986A (based on the S. pyogenes Cas9 protein). See, e.g., Zetsche et al. (2015). Further exemplary amino acid substitutions include D917A, E1006A, and D1255A (based on the Francisella novicida U112 Cpf1 (FnCpf1) sequence (UniProtKB—A0Q7Q2 (CPF1_FRATN)).

[0149] In some embodiments, a nickase is provided in combination with a pair of guide RNAs that are complementary to the sense and antisense strands of the target sequence, respectively. In this embodiment, the guide RNAs direct the nickase to a target sequence and introduce a DSB by generating a nick on opposite strands of the target sequence (i.e., double nicking). In some embodiments, a nickase is used together with two separate guide RNAs targeting opposite strands of DNA to produce a double nick in the target DNA. In some embodiments, a nickase is used together with two separate guide RNAs that are selected to be in close proximity to produce a double nick in the target DNA. In some embodiments, the RNA-guided DNA-binding agent comprises one or more heterologous functional domains (e.g., is or comprises a fusion polypeptide).

[0150] In some embodiments, the heterologous functional domain may facilitate transport of the RNA-guided DNA-binding agent into the nucleus of a cell. For example, the heterologous functional domain may be a nuclear localization signal (NLS). In some embodiments, the RNA-guided DNA-binding agent may be fused with 1-10 NLS(s). In some embodiments, the RNA-guided DNA-binding agent may be fused with 1-5 NLS(s). In some embodiments, the RNA-guided DNA-binding agent may be fused with one NLS. Where one NLS is used, the NLS may be linked at the N-terminus or the C-terminus of the RNA-guided DNA-binding agent sequence. It may also be inserted within the RNA-guided DNA binding agent sequence. In other embodiments, the RNA-guided DNA-binding agent may be fused with more than one NLS. In some embodiments, the RNA-guided DNA-binding agent may be fused with 2, 3, 4, or 5 NLSs. In some embodiments, the RNA-guided DNA-binding agent may be fused with two NLSs. In certain circumstances, the two NLSs may be the same (e.g., two SV40 NLSs) or different. In some embodiments, the RNA-guided DNA-binding agent is fused to two SV40 NLS sequences linked at the carboxy terminus. In some embodiments, the RNA-guided DNA-binding agent may be fused with two NLSs, one linked at the N-terminus and one at the C-terminus. In some embodiments, the RNA-guided DNA-binding agent may be fused with 3 NLSs. In some embodiments, the RNA-guided DNA-binding agent may be fused with no NLS. In some embodiments, the NLS may be a monopartite sequence, such as, e.g., the SV40 NLS, PKKKRKV (SEQ ID NO: 600) or PKKKRRV (SEQ ID NO: 601). In some embodiments, the NLS may be a bipartite sequence, such as the NLS of nucleoplasmin, KRPAATKKAGQAKKKK (SEQ ID NO: 602). In a specific embodiment, a single PKKKRKV (SEQ ID NO: 600) NLS may be linked at the C-terminus of the RNA-guided DNA-binding agent. One or more linkers are optionally included at the fusion site.

### D. Donor Construct/Sequences

[0151] The compositions and methods described herein include the use of a nucleic acid construct that comprises a sequence encoding a heterologous gene to be inserted into a cut site created by a guide RNA of the present disclosure and an RNA-guided DNA binding agent. As used herein, such a construct is sometimes referred to as a “donor construct/template”. The constructs may encode any expressed nucleic acid (i.e., nucleic acid that can be expressed), for example, DNA, messenger RNA (mRNA), a functional RNA, small interfering RNA (siRNA), microRNA (miRNA), single stranded RNA (ssRNA), long non-coding RNAs, or antisense oligonucleotides.

[0152] The compositions and methods described herein include the use of a non-bidirectional or unidirectional construct, e.g., encoding a single transgene, encoding two transgenes in cis, etc. The unidirectional construct mae comprise a coding sequence linked to a splice acceptor.

[0153] The compositions and methods described herein include the use of a bidirectional construct described herein comprising at least two nucleic acid segments in cis, wherein one segment (the first segment) comprises a coding sequence or transgene, while the other segment (the second segment) comprises a sequence wherein the complement of the sequence encodes a transgene. A bidirectional construct may comprise a first coding sequence that encodes a heterologous gene linked to a splice acceptor and a second coding sequence wherein the complement encodes a heterologous gene in the other orientation, also linked to a splice acceptor.

[0154] In some embodiments, the constructs disclosed herein comprise a splice acceptor site on either or both ends of the construct, e.g., 5′ of an open reading frame in the first and/or second segments, or 5′ of one or both transgene sequences. In some embodiments, the splice acceptor site comprises NAG. In further embodiments, the splice acceptor site consists of NAG. In some embodiments, the splice acceptor is an albumin splice acceptor, e.g., an albumin splice acceptor used in the splicing together of exons 1 and 2 of albumin. In some embodiments, the splice acceptor is derived from the human albumin gene. In some embodiments, the splice acceptor is derived from the mouse albumin gene. In some embodiments, the splice acceptor is a F9 (or “FIX”) splice acceptor, e.g., the F9 splice acceptor used in the splicing together of exons 1 and 2 of F9. In some embodiments, the splice acceptor is derived from the human F9 gene. In some embodiments, the splice acceptor is derived from the mouse F9 gene. Additional suitable splice acceptor sites useful in eukaryotes, including artificial splice acceptors are known and can be derived from the art. See, e.g., Shapiro, et al., 1987, Nucleic Acids Res., 15, 7155-7174, Burset, et al., 2001, Nucleic Acids Res., 29, 255-259.

[0155] In some embodiments, the polyadenylation tail sequence is encoded, e.g., as a “poly-A” stretch, at the 3′ end of the first and/or second segment. In some embodiments, a polyadenylation tail sequence is provided co-transcriptionally as a result of a polyadenylation signal sequence that is encoded at or near the 3′ end of the first and/or second segment. Methods of designing a suitable polyadenylation tail sequence and/or polyadenylation signal sequence are well known in the art. Suitable splice acceptor sequences are disclosed and exemplified herein, including mouse albumin and human FIX splice acceptor sites. In some embodiments, the polyadenylation signal sequence AAUAAA (SEQ ID NO: 800) is commonly used in mammalian systems, although variants such as UAUAAA (SEQ ID NO: 801) or AU/GUAAA (SEQ ID NO: 802) have been identified. See, e.g., NJ Proudfoot, Genes & Dev. 25 (17): 1770-82, 2011. In some embodiments, a polyA tail sequence is included. The length of the construct can vary, depending on the size of the gene to be inserted, and can be, for example, from 200 base pairs (bp) to about 5000 bp, such as about 200 bp to about 2000 bp, such as about 500 bp to about 1500 bp. In some embodiments, the length of the DNA donor template is about 200 bp, or is about 500 bp, or is about 800 bp, or is about 1000 base pairs, or is about 1500 base pairs. In other embodiments, the length of the donor template is at least 200 bp, or is at least 500 bp, or is at least 800 bp, or is at least 1000 bp, or is at least 1500 bp.

[0156] The construct can be DNA or RNA, single-stranded, double-stranded or partially single- and partially double-stranded and can be introduced into a host cell in linear or circular (e.g., minicircle) form. See, e.g., U.S. Patent Publication Nos. 2010/0047805, 2011/0281361, 2011/0207221. If introduced in linear form, the ends of the donor sequence can be protected (e.g., from exonucleolytic degradation) by methods known to those of skill in the art. For example, one or more dideoxynucleotide residues are added to the 3′ terminus of a linear molecule and/or self-complementary oligonucleotides are ligated to one or both ends. See, for example, Chang et al. (1987) Proc. Natl. Acad. Sci. USA 84:4959-4963; Nehls et al. (1996) Science 272:886-889. Additional methods for protecting exogenous polynucleotides from degradation include, but are not limited to, addition of terminal amino group(s) and the use of modified internucleotide linkages such as, for example, phosphorothioates, phosphoramidates, and O-methyl ribose or deoxyribose residues. A construct can be introduced into a cell as part of a vector molecule having additional sequences such as, for example, replication origins, promoters and genes encoding antibiotic resistance. A construct may omit viral elements. Moreover, donor constructs can be introduced as naked nucleic acid, as nucleic acid complexed with an agent such as a liposome or poloxamer, or can be delivered by viruses (e.g., adenovirus, AAV, herpesvirus, retrovirus, lentivirus).

[0157] In some embodiments, although not required for expression, the constructs disclosed herein may also include transcriptional or translational regulatory sequences, for example, promoters, enhancers, insulators, internal ribosome entry sites, sequences encoding peptides, and/or polyadenylation signals.

[0158] In some embodiments, the constructs comprising a coding sequence for a polypeptide of interest may include one or more of the following modifications: codon optimization (e.g., to human codons) and/or addition of one or more glycosylation sites. See, e.g., McIntosh et al. (2013) Blood (17): 3335-44.

[0159] In some embodiments, the construct may be inserted so that its expression is driven by the endogenous promoter at the insertion site (e.g., the endogenous albumin promoter when the donor is integrated into the host cell's albumin locus). In such cases, the transgene may lack control elements (e.g., promoter and/or enhancer) that drive its expression (e.g., a promoterless construct). Nonetheless, it will be apparent that in other cases the construct may comprise a promoter and/or enhancer, for example a constitutive promoter or an inducible or tissue specific (e.g., liver- or platelet-specific) promoter that drives expression of the functional protein upon integration. The construct may comprise a sequence encoding a heterologous protein downstream of and operably linked to a signal sequence encoding a signal peptide, e.g., an albumin signal peptide, a signal peptide from a hepatocyte secreted protein. The construct may comprise a sequence encoding a heterologous protein downstream of and operably linked to a signal sequence encoding a signal peptide from the the heterologous protein. In some embodiments, the nucleic acid construct works in homology-independent insertion of a nucleic acid that encodes a transgenic protein. In some embodiments, the nucleic acid construct works in non-dividing cells, e.g., cells in which NHEJ, not HR, is the primary mechanism by which double-stranded DNA breaks are repaired. The nucleic acid may be a homology-independent donor construct.

[0160] The construct may be a bidirectional nucleic acid constructs comprising at least two nucleic acid segments, wherein one segment (the first segment) comprises a coding sequence that encodes an agent of interest (the coding sequence may be referred to herein as “transgene” or a first transgene), while the other segment (the second segment) comprises a sequence wherein the complement of the sequence encodes an agent of interest, or a second transgene. In some embodiments, a coding sequence encodes a therapeutic agent, such as a polypeptide, functional RNA, or enhancer. The at least two segments can encode identical or different polypeptides or identical or different agents. In some embodiments, the bidirectional constructs disclosed herein comprise at least two nucleic acid segments, wherein one segment (the first segment) comprises a coding sequence that encodes a polypeptide of interest, while the other segment (the second segment) comprises a sequence wherein the complement of the sequence encodes a polypeptide of interest. When used in combination with a gene editing system as described herein, the bidirectionality of the nucleic acid constructs allows the construct to be inserted in either direction (is not limited to insertion in one direction) within a target insertion site, allowing the expression of the polypeptide of interest from either a) a coding sequence of one segment (e.g., the left segment encoding “Human F9” in the upper left ssAAV construct of FIG. 1), or 2) a complement of the other segment (e.g., the complement of the right segment encoding “Human F9” indicated upside down in in the upper left ssAAV construct FIG. 1), thereby enhancing insertion and expression efficiency, as exemplified herein. Targeted cleavage by a gene editing system can facilitate construct integration and/or transgene expression. Various known gene editing systems can be used in the practice of the present disclosure, including, e.g., site-specific DNA cleavage systems including a CRISPR/Cas system; zinc finger nuclease (ZFN) system; or transcription activator-like effector nuclease (TALEN) system.

[0161] In some embodiments, the bidirectional nucleic acid construct does not comprise a promoter that drives the expression of the agent or polypeptide. For example, the expression of the polypeptide is driven by a promoter of the host cell (e.g., the endogenous albumin promoter when the transgene is integrated into a host cell's albumin locus). In some embodiments, the bidirectional nucleic acid construct includes a first segment and a second segment, each having a splice acceptor upstream of a transgene. In certain embodiments, the splice acceptor is compatible with the splice donor sequence of the host cell's safe harbor site, e.g. the splice donor of intron 1 of a human albumin gene.

[0162] In some embodiments, the bidirectional nucleic acid construct comprises a first segment comprising a coding sequence for a polypeptide and a second segment comprising a reverse complement of a coding sequence of the polypeptide. The same is true for non-polypeptide agents. Thus, the coding sequence in the first segment is capable of expressing a polypeptide, while the complement of the reverse complement in the second segment is also capable of expressing the polypeptide. As used herein, “coding sequence” when referring to the second segment comprising a reverse complement sequence refers to the complementary (coding) strand of the second segment (i.e., the complement coding sequence of the reverse complement sequence in the second segment).

[0163] In some embodiments, the coding sequence that encodes Polypeptide A in the first segment is less than 100% complementary to the reverse complement of a coding sequence that also encodes Polypeptide A. That is, in some embodiments, the first segment comprises a coding sequence (1) for Polypeptide A, and the second segment is a reverse complement of a coding sequence (2) for Polypeptide A, wherein the coding sequence (1) is not identical to the coding sequence (2). For example, coding sequence (1) and/or coding sequence (2) that encodes for Polypeptide A can utilize different codons. In some embodiments, one or both sequences can be codon optimized, such that coding sequence (1) and the reverse complement of coding sequence (2) possess 100% or less than 100% complementarity. In some embodiments, the coding sequence of the second segment encodes the polypeptide using one or more alternative codons for one or more amino acids of the same polypeptide encoded by the coding sequence in the first segment. An “alternative codon” as used herein refers to variations in codon usage for a given amino acid, and may or may not be a preferred or optimized codon (codon optimized) for a given expression system. Preferred codon usages, or codons that are well-tolerated in a given system of expression, are known in the art.

[0164] In some embodiments, the second segment comprises a reverse complement sequence that adopts different codon usage from that of the coding sequence of the first segment in order to reduce hairpin formation. Such a reverse complement forms base pairs with fewer than all nucleotides of the coding sequence in the first segment, yet it optionally encodes the same polypeptide. In such cases, the coding sequence, e.g. for Polypeptide A, of the first segment many be homologous to, but not identical to, the coding sequence, e.g. for Polypeptide A of the second half of the bidirectional construct. In some embodiments, the second segment comprises a reverse complement sequence that is not substantially complementary (e.g., not more than 70% complementary) to the coding sequence in the first segment. In some embodiments, the second segment comprises a reverse complement sequence that is highly complementary (e.g., at least 90% complementary) to the coding sequence in the first segment. In some embodiments, the second segment comprises a reverse complement sequence having at least about 30%, about 35%, about 40%, about 45%, about 50%, about 55%, about 60%, about 65%, about 70%, about 75%, about 80%, about 85%, about 90%, about 95%, about 97%, or about 99% complementarity to the coding sequence in the first segment.

[0165] In some embodiments, the second segment comprises a reverse complement sequence having 100% complementarity to the coding sequence in the first segment. That is, the sequence in the second segment is a perfect reverse complement of the coding sequence in the first segment. By way of example, the first segment comprises a hypothetical sequence 5′ CTGGACCGA 3′ (SEQ ID NO: 500) and the second segment comprises the reverse complement of SEQ ID NO: 1—i.e., 5′ TCGGTCCAG 3′ (SEQ ID NO: 502).

[0166] In some embodiments, the bidirectional nucleic acid construct comprises a first segment comprising a coding sequence for a polypeptide or agent (e.g. a first polypeptide) and a second segment comprising a reverse complement of a coding sequence of a polypeptide or agent (e.g. a second polypeptide). In some embodiments, the first polypeptide and the second polypeptide are the same, as described above. In some embodiments, the first therapeutic agent and the second therapeutic agent are the same, as described above. In some embodiments, the first polypeptide and the second polypeptides are different. In some embodiments, the first therapeutic agent and the second therapeutic agent are different. For example, the first polypeptide is Polypeptide A and the second polypeptide is Polypeptide B. As a further example, the first polypeptide is Polypeptide A and the second polypeptide is a variant (e.g., a fragment (such as a functional fragment), mutant, fusion (including addition of as few as one amino acid at a polypeptide terminus), or combinations thereof) of Polypeptide A. A coding sequence that encodes a polypeptide may optionally comprise one or more additional sequences, such as sequences encoding amino- or carboxy-terminal amino acid sequences such as a signal sequence, label sequence (e.g. HiBit), or heterologous functional sequence (e.g. nuclear localization sequence (NLS) or self-cleaving peptide) linked to the polypeptide. A coding sequence that encodes a polypeptide may optionally comprise sequences encoding one or more amino-terminal signal peptide sequences. Each of these additional sequences can be the same or different in the first segment and second segment of the construct.

[0167] The bidirectional construct described herein can be used to express any polypeptide according to the methods disclosed herein. In some embodiments, the polypeptide is a secreted polypeptide. In some embodiments, the polypeptide is one in which its function is normally effected (e.g., functionally active) as a secreted polypeptide. A “secreted polypeptide” as used herein refers to a protein that is secreted by the cell and/or is functionally active as a soluble extracellular protein.

[0168] In some embodiments, the polypeptide is an intracellular polypeptide. In some embodiments, the polypeptide is one in which its function is normally effected (e.g., functionally active) inside a cell. An “intracellular polypeptide” as used herein refers to a protein that is not secreted by the cell, including soluble cytosolic polypeptides.

[0169] In some embodiments, the polypeptide is a wild-type polypeptide.

[0170] In some embodiments, the polypeptide is a liver protein or variant thereof. As used herein, a “liver protein” is a protein that is, e.g., endogenously produced in the liver and/or functionally active in the liver. In some embodiments, the liver protein is a circulating protein produced by the liver or a variant thereof. In some embodiments, the liver protein is a protein that is functionally active in the liver or a variant thereof. In some embodiments, the liver protein exhibits an elevated expression in liver compared to one or more other tissue types. 20) In some embodiments, the polypeptide is a non-liver protein.

[0171] In some embodiments, the bidirectional nucleic acid construct is linear. For example, the first and second segments are joined in a linear manner through a linker sequence. In some embodiments, the 5′ end of the second segment that comprises a reverse complement sequence is linked to the 3′ end of the first segment. In some embodiments, the 5′ end of the first segment is linked to the 3′ end of the second segment that comprises a reverse complement sequence. In some embodiments, the linker sequence is about 1, 2, 3, 4, 5, 6, 7, 8, 9, 10, 11, 12, 13, 14, 15, 16, 17, 18, 19, 20, 25, 30, 35, 40, 45, 50, 55, 60, 65, 70, 75, 80, 85, 90, 95, 100, 150, 200, 250, 300, 500, 1000, 1500, 2000 or more nucleotides in length. As would be appreciated by those of skill in the art, other structural elements in addition to, or instead of a linker sequence, can be inserted between the first and second segments.

[0172] The constructs disclosed herein can be modified to include any suitable structural feature as needed for any particular use and/or that confers one or more desired function. In some embodiments, the bidirectional nucleic acid construct disclosed herein does not comprise a homology arm. In some embodiments, the constructs, e.g. bidirectional nucleic acid constructs, are capable of insertion into a genomic locus by non-homologous end joining (NHEJ). In some embodiments, constructs disclosed herein are homology-independent donor constructs. In some embodiments, owing in part to the bidirectional function of the nucleic acid construct, the bidirectional construct can be inserted into a genomic locus in either direction (orientation) as described herein to allow for efficient insertion and/or expression of a polypeptide of interest.

[0173] In some embodiments, the composition described herein comprises one or more internal ribosome entry site (IRES). First identified as a feature of Picorna virus RNA, IRES plays an important role in initiating protein synthesis in absence of the 5′ cap structure. An IRES may act as the sole ribosome binding site, or may serve as one of multiple ribosome binding sites of polynucleotides. Constructs containing more than one functional ribosome binding site may encode several peptides or polypeptides that are translated independently by the ribosomes (“multicistronic nucleic acid molecules”). Alternatively, constructs may comprise an IRES in order to express a heterologous protein which is not fused to an endogenous polypeptide (i.e. an albumin signal peptide). Examples of IRES sequences that can be utilized include without limitation, those from picornaviruses (e.g. FMDV), pest viruses (CFFV), polio viruses (PV), encephalomyocarditis viruses (ECMV), foot-and-mouth disease viruses (FMDV), hepatitis C viruses (HCV), classical swine fever viruses (CSFV), murine leukemia virus (MLV), simian immune deficiency viruses (SIV) or cricket paralysis viruses (CrPV).

[0174] In some embodiments, the nucleic acid construct comprises a sequence encoding a self cleaving peptide such as a 2A sequence or a 2A-like sequence. The self cleaving peptide may be a P2A peptide, a T2A peptide, or the like. In some embodiments, the self cleaving peptide is located upstream of the polypeptide of interest. In one embodiment, the sequence encoding the 2A peptide may be used to separate the coding region of two or more polypeptides of interest. In another embodiment, this sequence may be used to separate the coding sequence from the construct and the coding sequence from the endogenous locus (i.e. endogenous albumin signal sequence). As a non-limiting example, the sequence encoding the 2A peptide may be between region A and region B (A-2A-B). The presence of the 2A peptide would result in the cleavage of one long protein into protein A, protein B and the 2A peptide. Protein A and protein B may be the same or different polypeptides of interest.

[0175] In some embodiments, one or both of the first and second segment comprises a polyadenylation tail sequence and/or a polyadenylation signal sequence downstream of an open reading frame. In some embodiments, the polyadenylation tail sequence is encoded, e.g., as a “poly-A” stretch, at the 3′ end of the first and/or second segment.

### III. Delivery Methods

[0176] The guide RNAs disclosed herein can be delivered to a host cell or subject, in vivo or ex vivo, using various known and suitable methods available in the art. The guide RNAs can be delivered together (individually or combined) with a RNA-guided DNA-binding agent such as Cas or nucleic acid encoding a Cas9 (e.g., Cas9 or a nucleic acid encoding a Cas9) and a construct that comprises a sequence encoding a heterologous gene to be inserted into a cut site created by a guide RNA of the present disclosure, as described herein.

[0177] Conventional viral and non-viral based gene delivery methods can be used to introduce the guide RNA disclosed herein as well as the RNA-guided DNA binding agent and donor construct in cells (e.g., mammalian cells) and target tissues. As further provided herein, non-viral vector delivery systems nucleic acids such as non-viral vectors, plasmid vectors, and, e.g naked nucleic acid, and nucleic acid complexed with a delivery vehicle such as a liposome, lipid nanoparticle (LNP), or poloxamer. Viral vector delivery systems include DNA and RNA viruses.

[0178] Methods and compositions for non-viral delivery of nucleic acids include electroporation, lipofection, microinjection, biolistics, virosomes, liposomes, immunoliposomes, LNPs, polycation or lipid: nucleic acid conjugates, naked nucleic acid (e.g., naked DNA/RNA), artificial virions, and agent-enhanced uptake of DNA. Sonoporation using, e.g., the Sonitron 2000 system (Rich-Mar) can also be used for delivery of nucleic acids.

[0179] Additional exemplary nucleic acid delivery systems include those provided by AmaxaBiosystems (Cologne, Germany), Maxcyte, Inc. (Rockville, Md.), BTX Molecular Delivery Systems (Holliston, Ma.) and Copernicus Therapeutics Inc., (see for example U.S. Pat. No. 6,008,336). Lipofection is described in e.g., U.S. Pat. Nos. 5,049,386; 4,946,787; and 4,897,355) and lipofection reagents are sold commercially (e.g., Transfectam™ and Lipofectin™). The preparation of lipid: nucleic acid complexes, including targeted liposomes such as immunolipid complexes, is well known in the art, and as described herein.

[0180] Various delivery systems (e.g., vectors, liposomes, LNPs) containing the guide RNAs, RNA-guided DNA binding agent, and donor construct, singly or in combination, can also be administered to an organism for delivery to cells in vivo or administered to a cell or cell culture ex vivo. Administration is by any of the routes normally used for introducing a molecule into ultimate contact with blood, fluid, or cells including, but not limited to, injection, infusion, topical application and electroporation. Suitable methods of administering such nucleic acids are available and well known to those of skill in the art.

[0181] In some embodiments, the guide RNA compositions described herein, alone or encoded on one or more vectors, are formulated in or administered via a lipid nanoparticle; see e.g., PCT/US2017/024973 the contents of which are hereby incorporated by reference in their entirety. Any lipid nanoparticle (LNP) formulation known to those of skill in the art to be capable of delivering nucleotides to subjects may be utilized with the guide RNAs described herein, as well as either mRNA encoding an RNA-guided DNA binding agent such as Cas or Cas9, or an RNA-guided DNA binding agent such as Cas or Cas9 protein itself.

[0182] In some embodiments, the guide RNAs disclosed herein can be delivered to a host cell (in vitro or in vivo) delivered via an LNP. In some embodiments, the gRNA/LNP is also associated with an RNA-guided DNA binding agent such as Cas9 or an mRNA encoding an RNA-guided DNA binding agent such as Cas9. In some embodiments, the gRNA/LNP is also associated with a donor construct as described herein.

[0183] In some embodiments, the present disclosure includes a method for delivering the gRNAs disclosed herein to a cell in vitro, wherein the gRNA is delivered via an LNP. In some embodiments, the gRNA is delivered by a non-LNP means, such as via an AAV system, and an RNA-guided DNA binding agent (e.g., Cas9) or an mRNA encoding a RNA-guided DNA binding agent (e.g., Cas9), and/or a donor construct is delivered by an LNP.

[0184] In some embodiments, the present disclosure provides a composition comprising any one of the gRNAs disclosed herein and an LNP. In some embodiments, the composition further comprises a Cas9 or an mRNA encoding Cas9, or another RNA-guided DNA binding agent described herein. In some embodiments, the composition further comprises a donor construct as described herein.

[0185] In some embodiments, the LNPs comprise biodegradable, ionizable lipids. In some embodiments, the LNPs comprise (9Z,12Z)-3-((4,4-bis(octyloxy) butanoyl)oxy)-2-((((3-(diethylamino) propoxy) carbonyl)oxy)methyl) propyl octadeca-9,12-dienoate, also called 3-((4,4-bis(octyloxy) butanoyl)oxy)-2-((((3-(diethylamino) propoxy) carbonyl)oxy)methyl) propyl (9Z,12Z)-octadeca-9,12-dienoate) or another ionizable lipid. See, e.g., lipids of PCT/US2018/053559 (filed Sep. 28, 2018), WO/2017/173054, WO2015/095340, and WO2014/136086, as well as references provided therein. In some embodiments, the term cationic and ionizable in the context of LNP lipids is interchangeable, e.g., wherein ionizable lipids are cationic depending on the pH.

[0186] In some embodiments, any of the guide RNAs described herein, RNA-guided DNA binding agents, and/or donor constructs (e.g., bidirectional constructs) disclosed herein, alone or in combination, whether naked or as part of a vector, is formulated in or administered via a lipid nanoparticle; see e.g., WO/2017/173054 the contents of which are hereby incorporated by reference in their entirety.

[0187] Electroporation is also a well-known means for delivery of cargo, and any electroporation methodology may be used for delivery of any one of the gRNAs disclosed herein. In some embodiments, electroporation may be used to deliver any one of the gRNAs disclosed herein, optionally with an RNA-guided DNA binding agent such as Cas9 or an mRNA encoding an RNA-guided DNA binding agent such as Cas9 delivered by the same or different means. In some embodiments, electroporation may be used to deliver any one of the gRNAs disclosed herein and a donor construct as disclosed herein.

[0188] In certain embodiments, the present disclosure provides DNA or RNA vectors encoding any of the guide RNAs comprising any one or more of the guide sequences described herein. In certain embodiments, the invention comprises DNA or RNA vectors encoding any one or more of the guide sequences described herein. In some embodiments, in addition to guide RNA sequences, the vectors further comprise nucleic acids that do not encode guide RNAs. Nucleic acids that do not encode guide RNA include, but are not limited to, promoters, enhancers, regulatory sequences, nucleic acids encoding an RNA-guided DNA binding agent, which can be a nuclease such as Cas9, and a donor construct comprising a heterologous gene. In some embodiments, the vector comprises one or more nucleotide sequence(s) encoding a crRNA, a trRNA, or a crRNA and trRNA, as disclosed herein.

[0189] In some embodiments, the vector comprises one or more nucleotide sequence(s) encoding a sgRNA and an mRNA encoding an RNA-guided DNA binding agent, which can be a Cas protein, such as Cas9 or Cpf1. In some embodiments, the vector comprises one or more nucleotide sequence(s) encoding a crRNA, a trRNA, and an mRNA encoding an RNA-guided DNA binding agent, which can be a Cas protein, such as, Cas9 or Cpf1. In one embodiment, the Cas9 is from Streptococcus pyogenes (i.e., Spy Cas9). In some embodiments, the nucleotide sequence encoding the crRNA, trRNA, or crRNA and trRNA (which may be a sgRNA) comprises or consists of a guide sequence flanked by all or a portion of a repeat sequence from a naturally-occurring CRISPR/Cas system. The nucleic acid comprising or consisting of the crRNA, trRNA, or crRNA and trRNA may further comprise a vector sequence wherein the vector sequence comprises or consists of nucleic acids that are not naturally found together with the crRNA, trRNA, or crRNA and trRNA.

[0190] In some embodiments, the crRNA and the trRNA are encoded by non-contiguous nucleic acids within one vector. In other embodiments, the crRNA and the trRNA may be encoded by a contiguous nucleic acid. In some embodiments, the crRNA and the trRNA are encoded by opposite strands of a single nucleic acid. In other embodiments, the crRNA and the trRNA are encoded by the same strand of a single nucleic acid.

[0191] In some embodiments, the vector may be circular. In other embodiments, the vector may be linear. In some embodiments, the vector may be delivered via a lipid nanoparticle, liposome, non-lipid nanoparticle, or viral capsid. Non-limiting exemplary vectors include plasmids, phagemids, cosmids, artificial chromosomes, minichromosomes, transposons, viral vectors, and expression vectors.

[0192] In some embodiments, the vector may be a viral vector. In some embodiments, the viral vector may be genetically modified from its wild type counterpart. For example, the viral vector may comprise an insertion, deletion, or substitution of one or more nucleotides to facilitate cloning or such that one or more properties of the vector is changed. Such properties may include packaging capacity, transduction efficiency, immunogenicity, genome integration, replication, transcription, and translation. In some embodiments, a portion of the viral genome may be deleted such that the virus is capable of packaging exogenous sequences having a larger size. In some embodiments, the viral vector may have an enhanced transduction efficiency. In some embodiments, the immune response induced by the virus in a host may be reduced. In some embodiments, viral genes (such as, e.g., integrase) that promote integration of the viral sequence into a host genome may be mutated such that the virus becomes non-integrating. In some embodiments, the viral vector may be replication defective. In some embodiments, the viral vector may comprise exogenous transcriptional or translational control sequences to drive expression of coding sequences on the vector. In some embodiments, the virus may be helper-dependent. For example, the virus may need one or more helper virus to supply viral components (such as, e.g., viral proteins) required to amplify and package the vectors into viral particles. In such a case, one or more helper components, including one or more vectors encoding the viral components, may be introduced into a host cell along with the vector system described herein. In other embodiments, the virus may be helper-free. For example, the virus may be capable of amplifying and packaging the vectors without a helper virus. In some embodiments, the vector system described herein may also encode the viral components required for virus amplification and packaging.

[0193] Non-limiting exemplary viral vectors include adeno-associated virus (AAV) vector, lentivirus vectors, adenovirus vectors, helper dependent adenoviral vectors (HDAd), herpes simplex virus (HSV-1) vectors, bacteriophage T4, baculovirus vectors, and retrovirus vectors. In some embodiments, the viral vector may be an AAV vector. In other embodiments, the viral vector may a lentivirus vector.

[0194] In some embodiments, “AAV” refers all serotypes, subtypes, and naturally-occurring AAV as well as recombinant AAV. “AAV” may be used to refer to the virus itself or a derivative thereof. The term “AAV” includes AAV1, AAV2, AAV3, AAV3B, AAV4, AAV5, AAV6, AAV6.2, AAV7, AAVrh.64R1, AAVhu.37, AAVrh.8, AAVrh.32.33, AAV8, AAV9, AAV-DJ. AAV2/8, AAVrh10, AAVLK03, AV10, AAV11, AAV12, rh10, and hybrids thereof, avian AAV, bovine AAV, canine AAV, equine AAV, primate AAV, nonprimate AAV, and ovine AAV. The genomic sequences of various serotypes of AAV, as well as the sequences of the native terminal repeats (TRs), Rep proteins, and capsid subunits are known in the art. Such sequences may be found in the literature or in public databases such as GenBank. A “AAV vector” as used herein refers to an AAV vector comprising a heterologous sequence not of AAV origin (i.e., a nucleic acid sequence heterologous to AAV), typically comprising a sequence encoding a heterologous polypeptide of interest. The construct may comprise an AAV1, AAV2, AAV3, AAV3B, AAV4, AAV5, AAV6, AAV6.2, AAV7, AAVrh.64R1, AAVhu.37, AAVrh.8, AAVrh.32.33, AAV8, AAV9, AAV-DJ, AAV2/8, AAVrh10, AAVLK03, AV10, AAV11, AAV12, rh10, and hybrids thereof, avian AAV, bovine AAV, canine AAV, equine AAV, primate AAV, nonprimate AAV, and ovine AAV capside sequence. In general, the heterologous nucleic acid sequence (the transgene) is flanked by at least one, and generally by two, AAV inverted terminal repeat sequences (ITRs). An AAV vector may either be single-stranded (ssAAV) or self-complementary (scAAV).

[0195] In some embodiments, the lentivirus may be non-integrating. In some embodiments, the viral vector may be an adenovirus vector. In some embodiments, the adenovirus may be a high-cloning capacity or “gutless” adenovirus, where all coding viral regions apart from the 5′ and 3′ inverted terminal repeats (ITRs) and the packaging signal (‘I’) are deleted from the virus to increase its packaging capacity. In yet other embodiments, the viral vector may be an HSV-1 vector. In some embodiments, the HSV-1-based vector is helper dependent, and in other embodiments it is helper independent. For example, an amplicon vector that retains only the packaging sequence requires a helper virus with structural components for packaging, while a 30 kb-deleted HSV-1 vector that removes non-essential viral functions does not require helper virus. In additional embodiments, the viral vector may be bacteriophage T4. In some embodiments, the bacteriophage T4 may be able to package any linear or circular DNA or RNA molecules when the head of the virus is emptied. In further embodiments, the viral vector may be a baculovirus vector. In yet further embodiments, the viral vector may be a retrovirus vector. In embodiments using AAV or lentiviral vectors, which have smaller cloning capacity, it may be necessary to use more than one vector to deliver all the components of a vector system as disclosed herein. For example, one AAV vector may contain sequences encoding an RNA-guided DNA binding agent such as a Cas 15 protein (e.g., Cas9), while a second AAV vector may contain one or more guide sequences.

[0196] In some embodiments, the vector may be capable of driving expression of one or more coding sequences in a cell. In some embodiments, the cell may be a eukaryotic cell, such as, e.g., a yeast, plant, insect, or mammalian cell. In some embodiments, the eukaryotic cell may be a mammalian cell. In some embodiments, the eukaryotic cell may be a rodent cell. In some embodiments, the eukaryotic cell may be a human cell. Suitable promoters to drive expression in different types of cells are known in the art. In some embodiments, the promoter may be wild type. In other embodiments, the promoter may be modified for more efficient or efficacious expression. In yet other embodiments, the promoter may be truncated yet retain its function. For example, the promoter may have a normal size or a reduced size that is suitable for proper packaging of the vector into a virus.

[0197] In some embodiments, the vector may comprise a nucleotide sequence encoding an RNA-guided DNA binding agent such as a Cas protein (e.g., Cas9) described herein. In some embodiments, the nuclease encoded by the vector may be a Cas protein. In some embodiments, the vector system may comprise one copy of the nucleotide sequence encoding the nuclease. In other embodiments, the vector system may comprise more than one copy of the nucleotide sequence encoding the nuclease. In some embodiments, the nucleotide sequence encoding the nuclease may be operably linked to at least one transcriptional or translational control sequence. In some embodiments, the nucleotide sequence encoding the nuclease may be operably linked to at least one promoter.

[0198] In some embodiments, the vector may comprise any one or more of the constructs comprising a heterologous gene described herein. In some embodiments, the heterologous gene may be operably linked to at least one transcriptional or translational control sequence. In some embodiments, the heterologous gene may be operably linked to at least one promoter. In some embodiments, the heterologous gene is not linked to a promoter that drives the expression of the heterologous gene.

[0199] In some embodiments, the promoter may be constitutive, inducible, or tissue-specific. In some embodiments, the promoter may be a constitutive promoter. Non-limiting exemplary constitutive promoters include cytomegalovirus immediate early promoter (CMV), simian virus (SV40) promoter, adenovirus major late (MLP) promoter, Rous sarcoma virus (RSV) promoter, mouse mammary tumor virus (MMTV) promoter, phosphoglycerate kinase (PGK) promoter, elongation factor-alpha (EF1a) promoter, ubiquitin promoters, actin promoters, tubulin promoters, immunoglobulin promoters, a functional fragment thereof, or a combination of any of the foregoing. In some embodiments, the promoter may be a CMV promoter. In some embodiments, the promoter may be a truncated CMV promoter. In other embodiments, the promoter may be an EF1a promoter. In some embodiments, the promoter may be an inducible promoter. Non-limiting exemplary inducible promoters include those inducible by heat shock, light, chemicals, peptides, metals, steroids, antibiotics, or alcohol. In some embodiments, the inducible promoter may be one that has a low basal (non-induced) expression level, such as, e.g., the Tet-On® promoter (Clontech).

[0200] In some embodiments, the promoter may be a tissue-specific promoter, e.g., a promoter specific for expression in the liver.

[0201] The vector may further comprise a nucleotide sequence encoding the guide RNA described herein. In some embodiments, the vector comprises one copy of the guide RNA. In other embodiments, the vector comprises more than one copy of the guide RNA. In embodiments with more than one guide RNA, the guide RNAs may be non-identical such that they target different target sequences, or may be identical in that they target the same target sequence. In some embodiments where the vectors comprise more than one guide RNA, each guide RNA may have other different properties, such as activity or stability within a complex with an RNA-guided DNA nuclease, such as a Cas RNP complex. In some embodiments, the nucleotide sequence encoding the guide RNA may be operably linked to at least one transcriptional or translational control sequence, such as a promoter, a 3′ UTR, or a 5′ UTR. In one embodiment, the promoter may be a tRNA promoter, e.g., tRNA^{Lys3}, or a tRNA chimera. See Mefferd et al., RNA. 2015 21:1683-9; Scherer et al., Nucleic Acids Res. 2007 35:2620-2628. In some embodiments, the promoter may be recognized by RNA polymerase III (Pol III). Non-limiting examples of Pol III promoters include U6 and H1 promoters. In some embodiments, the nucleotide sequence encoding the guide RNA may be operably linked to a mouse or human U6 promoter. In other embodiments, the nucleotide sequence encoding the guide RNA may be operably linked to a mouse or human H1 promoter. In embodiments with more than one guide RNA, the promoters used to drive expression may be the same or different. In some embodiments, the nucleotide encoding the crRNA of the guide RNA and the nucleotide encoding the trRNA of the guide RNA may be provided on the same vector. In some embodiments, the nucleotide encoding the crRNA and the nucleotide encoding the trRNA may be driven by the same promoter. In some embodiments, the crRNA and trRNA may be transcribed into a single transcript. For example, the crRNA and trRNA may be processed from the single transcript to form a double-molecule guide RNA. Alternatively, the crRNA and trRNA may be transcribed into a single-molecule guide RNA (sgRNA). In other embodiments, the crRNA and the trRNA may be driven by their corresponding promoters on the same vector. In yet other embodiments, the crRNA and the trRNA may be encoded by different vectors.

[0202] In some embodiments, the nucleotide sequence encoding the guide RNA may be located on the same vector comprising the nucleotide sequence encoding an RNA-guided DNA binding agent such as a Cas protein. In some embodiments, expression of the guide RNA and of the RNA-guided DNA binding agent such as a Cas protein may be driven by their own corresponding promoters. In some embodiments, expression of the guide RNA May be driven by the same promoter that drives expression of the RNA-guided DNA binding agent such as a Cas protein. In some embodiments, the guide RNA and the RNA-guided DNA binding agent such as a Cas protein transcript may be contained within a single transcript. For example, the guide RNA may be within an untranslated region (UTR) of the RNA-guided DNA binding agent such as a Cas protein transcript. In some embodiments, the guide RNA may be within the 5′ UTR of the transcript. In other embodiments, the guide RNA may be within the 3′ UTR of the transcript. In some embodiments, the intracellular half-life of the transcript may be reduced by containing the guide RNA within its 3′ UTR and thereby shortening the length of its 3′ UTR. In additional embodiments, the guide RNA may be within an intron of the transcript. In some embodiments, suitable splice sites may be added at the intron within which the guide RNA is located such that the guide RNA is properly spliced out of the transcript.

[0203] In some embodiments, the compositions comprise a vector system. In some embodiments, the vector system may comprise one single vector. In other embodiments, the vector system may comprise two vectors. In additional embodiments, the vector system may comprise three vectors. When different guide RNAs are used for multiplexing, or when multiple copies of the guide RNA are used, the vector system may comprise more than three vectors. In some embodiments, the vector system may further comprise a donor construct as described herein. In some embodiments, the vector system may further comprise nucleic acids that encode a nuclease. In some embodiments, the vector system may further comprise nucleic acids that encode guide RNAs and/or nucleic acid encoding an RNA-guided DNA-binding agent, which can be a Cas protein such as Cas9. In some embodiments, a nucleic acid encoding a guide RNA and/or a nucleic acid encoding an RNA-guided DNA-binding agent or nuclease are each or both on a separate vector from a vector that comprises the donor constructs disclosed herein. In any of the embodiments, the vector system may include other sequences that include, but are not limited to, promoters, enhancers, regulatory sequences, as described herein. In some embodiments, a promoter within the vector system does not drive the expression of a transgene of the donor construct (e.g., bidirectional construct). In some embodiments, the vector system comprises one or more nucleotide sequence(s) encoding a crRNA, a trRNA, or a crRNA and trRNA. In some embodiments, the vector system comprises one or more nucleotide sequence(s) encoding a sgRNA and an mRNA encoding an RNA-guided DNA binding agent, which can be a Cas nuclease (e.g., Cas9). In some embodiments, the vector system comprises one or more nucleotide sequence(s) encoding a crRNA, a trRNA, and an mRNA encoding an RNA-guided DNA binding agent, which can be a Cas nuclease, such as, Cas9. In some embodiments, the Cas9 is from Streptococcus pyogenes (i.e., Spy Cas9). In some embodiments, the nucleotide sequence encoding the crRNA, trRNA, or crRNA and trRNA (which may be a sgRNA) comprises or consists of a guide sequence flanked by all or a portion of a repeat sequence from a naturally-occurring CRISPR/Cas system. The vector system may comprise a nucleic acid comprising or consisting of the crRNA, trRNA, or crRNA and trRNA, wherein the vector system comprises or consists of nucleic acids that are not naturally found together with the crRNA, trRNA, or crRNA and trRNA.

[0204] In some embodiments, the vector system may comprise inducible promoters to start expression only after it is delivered to a target cell. Non-limiting exemplary inducible promoters include those inducible by heat shock, light, chemicals, peptides, metals, steroids, antibiotics, or alcohol. In some embodiments, the inducible promoter may be one that has a low basal (non-induced) expression level, such as, e.g., the Tet-On® promoter (Clontech).

[0205] In additional embodiments, the vector system may comprise tissue-specific promoters to start expression only after it is delivered into a specific tissue.

[0206] The vector or vector system may be delivered by liposome, a nanoparticle, an exosome, or a microvesicle. The vector may also be delivered by a lipid nanoparticle (LNP). One or more guide RNA, RNA-binding DNA binding agent (e.g. mRNA), or donor construct comprising a sequence encoding a heterologous protein, individually or in any combination, may be delivered by liposome, a nanoparticle, an exosome, or a microvesicle. One or more guide RNA, RNA-binding DNA binding agent (e.g. mRNA), or donor construct comprising a sequence encoding a heterologous protein, individually or in any combination, may be delivered by LNP. Any of the LNPs and LNP formulations described herein are suitable for delivery of the guides, Cas nuclease (or an mRNA encoding a Cas nuclease), combinations thereof, and/or a construct comprising a heterologous gene. In some embodiments, an LNP composition is encompassed comprising: an RNA component and a lipid component, wherein the lipid component comprises an amine lipid, such as biodegradable, ionizable lipid; and wherein the RNA component comprises a guid RNA and/or an mRNA encoding a Cas nuclease. In some instances, the lipid component comprises biodegradable, ionizable lipid, cholesterol, DSPC, and PEG-DMG.

[0207] It will be apparent that a guide RNA disclosed herein, an RNA-guided DNA binding agent (e.g. Cas nuclease or a nucleic acid encoding a Cas nuclease), and a donor construct can be delivered using the same or different systems. For example, the guide RNA, Cas nuclease, and construct can be carried by the same vector (e.g., AAV). Alternatively, the Cas nuclease (as a protein or mRNA) and/or gRNA can be carried by a plasmid or LNP, while the construct can be carried by a vector. Furthermore, the different delivery systems can be administered by the same or different routes.

[0208] In some embodiments, the method comprises administering a guide RNA and an RNA-guided DNA binding agent (such as an mRNA encoding a Cas9 nuclease) in an LNP. In further embodiments, the method comprises administering an AAV nucleic acid construct encoding a transgenic protein, such as an bidirectional construct. CRISPR/Cas9 LNP, comprising guide RNA and an mRNA encoding a Cas9, can be administered intravenously. AAV donor construct can be administered intravenously.

[0209] The different delivery systems can be delivered in vitro or in vivo simultaneously or in any sequential order. In some embodiments, the donor construct, guide RNA, and Cas nuclease can be delivered in vitro or in vivo simultaneously, e.g., in one vector, two vectors, individual vectors, one LNP, two LNPs, individual LNPs, or a combination thereof. In some embodiments, the donor construct can be delivered in vivo or in vitro, as a vector and/or associated with a LNP, prior to (e.g., about 1, 2, 3, 4, 5, 6, 7, 8, 9, 10, 11, 12, 13, 14, or more days) delivering the guide RNA and/or Cas nuclease, as a vector and/or associated with a LNP singly or together as a ribonucleoprotein (RNP). In some embodiments, the donor construct can be delivered in multiple administrations, e.g., every day, every two days, every three days, every four days, every week, every two weeks, every three weeks, or every four weeks. In some embodiments, the donor construct can be delivered at one-week intervals, e.g., at week 1, week 2, and week 3, etc. As a further example, the guide RNA and Cas nuclease, as a vector and/or associated with a LNP singly or together as a ribonucleoprotein (RNP), can be delivered in vivo or in vitro, prior to (e.g., about 1, 2, 3, 4, 5, 6, 7, 8, 9, 10, 11, 12, 13, 14, or more days) delivering the construct, as a vector and/or associated with a LNP. In some embodiments, the albumin guide RNA can be delivered in multiple administrations, e.g., every day, every two days, every three days, every four days, every week, every two weeks, every three weeks, or every four weeks. In some embodiments, the albumin guide RNA can be delivered at one-week intervals, e.g., at week 1, week 2, and week 3, etc. In some embodiments, the Cas nuclease can be delivered in multiple administrations, e.g., can be delivered every day, every two days, every three days, every four days, every week, every two weeks, every three weeks, or every four weeks. In some embodiments, the Cas nuclease can be delivered at one-week intervals, e.g., at week 1, week 2, and week 3, etc.

### IV. Methods of Use

[0210] The gRNAs and associated methods and compositions disclosed herein are useful for efficiently inserting a heterologous (exogenous) gene within intron 1 of a human albumin locus of a host cell. In some embodiments, the present disclosure provides a method of inserting a heterologous gene within intron 1 of a human albumin locus of a host cell, comprising administering to a host cell (in vivo or in vitro) a guide RNA as described herein (any one of SEQ ID NO: 2-33), an RNA-guided DNA binding agent (e.g., Cas nuclease as described herein), and a donor construct that comprises a sequence encoding a heterologous polypeptide of interest.

[0211] The gRNAs and associated methods and compositions disclosed herein are useful for expressing a heterologous (exogenous) gene within intron 1 of a human albumin locus of a host cell. In some embodiments, the present disclosure provides a method of expressing a heterologous gene within intron 1 of a human albumin locus of a host cell, comprising administering to a host cell (in vivo or in vitro) a guide RNA as described herein (any one of SEQ ID NO: 2-33), an RNA-guided DNA binding agent (e.g., Cas nuclease as described herein), and a donor construct that comprises a sequence encoding a heterologous polypeptide of interest.

[0212] The gRNAs and associated methods and compositions disclosed herein are useful for treating a liver-associated disorder in a subject, as described herein. In some embodiments, the present disclosure provides a method of treating a liver-associated disorder, comprising administering to a host cell (in vivo or in vitro) a guide RNA as described herein (any one of SEQ ID NO: 2-33), an RNA-guided DNA binding agent (e.g., Cas nuclease as described herein), and a donor construct that comprises a sequence encoding a polypeptide of interest.

[0213] The compositions and methods of the present disclosure are useful and applicable for a range of host cells. In some embodiments, the host cell is a liver cell, neuronal cell, or muscle cell. In some embodiments, the host cell is any suitable non-dividing cell. As used herein, a “non-dividing cell” refers to cells that are terminally differentiated and do not divide, as well as quiescent cells that do not divide but retains the ability to re-enter cell division and proliferation. Liver cells, for example, retain the ability to divide (e.g., when injured or resected), but do not typically divide. During mitotic cell division, homologous recombination is a mechanism by which the genome is protected and double-stranded breaks are repaired. In some embodiments, a “non-dividing” cell refers to a cell in which homologous recombination (HR) is not the primary mechanism by which double-stranded DNA breaks are repaired in the cell, e.g., as compared to a control dividing cell. In some embodiments, a “non-dividing” cell refers to a cell in which non-homologous end joining (NHEJ) is the primary mechanism by which double-stranded DNA breaks are repaired in the cell, e.g., as compared to a control dividing cell. Non-dividing cell types have been described in the literature, e.g. by active NHEJ double-stranded DNA break repair mechanisms. See, e.g. Iyama, DNA Repair (Amst.) 2013, 12 (8): 620-636. In some embodiments, the host cell includes, but is not limited to, a liver cell, a muscle cell, or a neuronal cell. In some embodiments, the host cell is a hepatocyte, such as a mouse, cyno, or human hepatocyte. In some embodiments, the host cell is a myocyte, such as a mouse, cyno, or human myocyte. In some embodiments, provided herein is a host cell, described above, that comprises the bidirectional construct disclosed herein. In some embodiments the host cell expresses the transgene polypeptide encoded by the bidirectional construct disclosed herein. In some embodiments, provided herein is a host cell made by a method disclosed herein. In certain embodiments, the host cell is made by administering or delivering to a host cell a bidirectional nucleic acid construct described herein, and a gene editing system such as a ZFN, TALEN, or CRISPR/Cas9 system.

[0214] In some embodiments, the method further comprises achieving a durable effect, e.g. at least 1 month, 2 months, 6 months, 1 year, or 2 year effect. In some embodiments, the method further comprises achieving the therapeutic effect in a durable and sustained manner, e.g. at least 1 month, 2 months, 6 months, 1 year, or 2 year effect. In some embodiments, the level of circulating Factor IX activity and/or level is stable for at least 1 month, 2 months, 6 months, 1 year, or more. In some embodiments a steady-state activity and/or level of FIX protein is achieved by at least 7 days, at least 14 days, or at least 28 days. In additional embodiments, the method comprises maintaining Factor IX activity and/or levels after a single dose for at least 1, 2, 4, or 6 months, or at least 1, 2, 3, 4, or 5 years.

[0215] In additional embodiments involving insertion into the albumin locus, the individual's circulating albumin levels are normal. The method may comprise maintaining the individual's circulating albumin levels within ±5%, ±10%, ±15%, ±20%, or ±50% of normal circulating albumin levels. In certain embodiments, the individual's albumin levels are unchanged as compared to the albumin levels of untreated individuals by at least week 4, week 8, week 12, or week 20. In certain embodiments, the individual's albumin levels transiently drop then return to normal levels. In particular, the methods may comprise detecting no significant alterations in levels of plasma albumin.

[0216] In some embodiments, the invention comprises a method or use of modifying (e.g., creating a double strand break in) an albumin gene, such as a human albumin gene, comprising, administering or delivering to a host cell or population of host cells any one or more of the gRNAs, donor construct (e.g., bidirectional construct comprising a sequence encoding Factor IX), and RNA-guided DNA binding agents (e.g., Cas nuclease) described herein. In some embodiments, the invention comprises a method or use of modifying (e.g., creating a double strand break in) an albumin intron 1 region, such as a human albumin intron 1, comprising, administering or delivering to a host cell or population of host cells any one or more of the gRNAs, donor construct (e.g., bidirectional construct comprising a sequence encoding Factor IX), and RNA-guided DNA binding agents (e.g., Cas nuclease) described herein. In some embodiments, the invention comprises a method or use of modifying (e.g., creating a double strand break in) a human genomic locus, such as a safe harbor site, such as liver tissue or hepatocyte host cell, comprising, administering or delivering to a host cell or population of host cells any one or more of the gRNAs, donor construct (e.g., bidirectional construct comprising a sequence encoding Factor IX), and RNA-guided DNA binding agents (e.g., Cas nuclease) described herein. Insertion within a genomic locus, such as a safe harbor site, such as an albumin locus safe harbor site (e.g., intron 1), allows overexpression of the Factor IX gene without significant deleterious effects on the host cell or cell population, such as hepatocytes or liver cells. In some embodiments, the invention comprises a method or use of modifying (e.g., creating a double strand break in) intron 1 of a human albumin locus comprising, administering or delivering to a host cell or population of host cells any one or more of the gRNAs, donor construct (e.g., bidirectional construct comprising a sequence encoding Factor IX), and RNA-guided DNA binding agents (e.g., Cas nuclease) described herein. In some embodiments, the guide RNA comprises a guide sequence that contains at least 15, 16, 17, 18, 19, or 20 contiguous nucleotides that bind within intron 1 of a human albumin locus (SEQ ID NO: 1). In some embodiments, the guide RNA comprises at least 15, 16, 17, 18, 19, or 20 contiguous nucleotides of a sequence selected from the group consisting of SEQ ID NOs: 2-33. In some embodiments, the guide RNA comprises a sequence that is at least 95%, 90%, 85%, 80%, or 75% identical to a sequence selected from the group consisting of SEQ ID NOs: 2-33. In some embodiments, the guide RNAs disclosed herein comprise a guide sequence selected from the group consisting of SEQ ID NO: 2, 8, 13, 19, 28, 29, 31, 32, 33. In some embodiments, the guide RNAs disclosed herein comprise a guide sequence at least 17, 18, 19, or 20 contiguous nucleotides of a sequence selected from the group consisting of SEQ ID NOS: 2, 8, 13, 19, 28, 29, 31, 32, 33. In some embodiments, the guide RNAs disclosed herein comprise a guide sequence selected from the group consisting of SEQ ID NOs: 34, 40, 45, 51, 60, 61, 63, 64, 65, 66, 72, 77, 83, 92, 93, 95, 96, and 97. In some embodiments, the guide RNAs disclosed herein comprise a guide sequence that is at least 95%, 90%, 85%, 80%, or 75% identical to a sequence selected from the group consisting of SEQ ID NOs: 2-33. In some embodiments, the guide RNAs disclosed herein comprise a guide sequence that is at least 17, 18, 19, or 20 contiguous nucleotides of a sequence selected from the group consisting of SEQ ID NOs: 2-33. In some embodiments, the guide RNAs disclosed herein comprise a guide sequence that is selected from the group consisting of SEQ ID NOs: 34-97. In some embodiments, the method is performed in vitro. In some embodiments, the method is performed in vivo. In some embodiments, the donor construct is a bidirectional construct that comprises a sequence encoding Factor IX. In some embodiments, the host cell is a liver cell, such as. In additional embodiments, the liver cell is a hepatocyte.

[0217] In some embodiments, the invention comprises a method or use of introducing a Factor IX nucleic acid to a host cell or population of host cells comprising, administering or delivering any one or more of the gRNAs, donor construct (e.g., bidirectional construct comprising a sequence encoding Factor IX), and RNA-guided DNA binding agents (e.g., Cas nuclease) described herein. In some embodiments, the guide RNA comprises a guide sequence that contains at least 15, 16, 17, 18, 19, or 20 contiguous nucleotides that are capable of binding to a region within intron 1 of human albumin locus (SEQ ID NO: 1). In some embodiments, the guide RNA comprises at least 15, 16, 17, 18, 19, or 20 contiguous nucleotides of a sequence selected from the group consisting of SEQ ID NOs: 2-33. In some embodiments, the guide RNA comprises a sequence that is at least 95%, 90%, 85%, 80%, or 75% identical to a sequence selected from the group consisting of SEQ ID NOs: 2-33. In some embodiments, the guide RNAs disclosed herein comprise a guide sequence selected from the group consisting of SEQ ID NO: 2, 8, 13, 19, 28, 29, 31, 32, 33. In some embodiments, the guide RNAs disclosed herein comprise a guide sequence at least 17, 18, 19, or 20 contiguous nucleotides of a sequence selected from the group consisting of SEQ ID NOs: 2, 8, 13, 19, 28, 29, 31, 32, 33. In some embodiments, the guide RNAs disclosed herein comprise a guide sequence selected from the group consisting of SEQ ID NOs: 34, 40, 45, 51, 60, 61, 63, 64, 65, 66, 72, 77, 83, 92, 93, 95, 96, and 97. In some embodiments, the guide RNAs disclosed herein comprise a guide sequence that is at least 95%, 90%, 85%, 80%, or 75% identical to a sequence selected from the group consisting of SEQ ID NOs: 2-33. In some embodiments, the guide RNAs disclosed herein comprise a guide sequence that is at least 17, 18, 19, or 20 contiguous nucleotides of a sequence selected from the group consisting of SEQ ID NOs: 2-33. In some embodiments, the guide RNAs disclosed herein comprise a guide sequence that is selected from the group consisting of SEQ ID NOs: 34-97. In some embodiments, the method is in vitro. In some embodiments, the method is in vivo. In some embodiments, the donor construct is a bidirectional construct that comprises a sequence encoding Factor IX. In some embodiments, the host cell is a liver cell, or the population of host cells are liver cells, such as hepatocyte.

[0218] In some embodiments, the invention comprises a method or use of expressing Factor IX in a host cell or a population of host cells comprising, administering or delivering any one or more of the gRNAs, donor construct (e.g., bidirectional construct comprising a sequence encoding Factor IX), and RNA-guided DNA binding agents (e.g., Cas nuclease) described herein. In some embodiments, the guide RNA comprises a guide sequence that contains at least 15, 16, 17, 18, 19, or 20 contiguous nucleotides that are capable of binding to a region within intron 1 of human albumin locus (SEQ ID NO: 1). In some embodiments, the guide RNA comprises at least 15, 16, 17, 18, 19, or 20 contiguous nucleotides of a sequence selected from the group consisting of SEQ ID NOS: 2-33. In some embodiments, the guide RNA comprises a sequence that is at least 95%, 90%, 85%, 80%, or 75% identical to a sequence selected from the group consisting of SEQ ID NOs: 2-33. In some embodiments, the guide RNAs disclosed herein comprise a guide sequence selected from the group consisting of SEQ ID NO: 2, 8, 13, 19, 28, 29, 31, 32, 33. In some embodiments, the guide RNAs disclosed herein comprise a guide sequence at least 17, 18, 19, or 20 contiguous nucleotides of a sequence selected from the group consisting of SEQ ID NOs: 2, 8, 13, 19, 28, 29, 31, 32, 33. In some embodiments, the guide RNAs disclosed herein comprise a guide sequence selected from the group consisting of SEQ ID NOs: 34, 40, 45, 51, 60, 61, 63, 64, 65, 66, 72, 77, 83, 92, 93, 95, 96, and 97. In some embodiments, the guide RNAs disclosed herein comprise a guide sequence that is at least 95%, 90%, 85%, 80%, or 75% identical to a sequence selected from the group consisting of SEQ ID NOs: 2-33. In some embodiments, the guide RNAs disclosed herein comprise a guide sequence that is at least 17, 18, 19, or 20 contiguous nucleotides of a sequence selected from the group consisting of SEQ ID NOs: 2-33. In some embodiments, the guide RNAs disclosed herein comprise a guide sequence that is selected from the group consisting of SEQ ID NOs: 34-97. In some embodiments, the method is in vitro. In some embodiments, the method is in vivo. In some embodiments, the donor construct is a bidirectional construct that comprises a sequence encoding Factor IX. In some embodiments, the host cell is a liver cell, or the population of host cells are liver cells, such as hepatocyte.

[0219] In some embodiments, the invention comprises a method or use of treating hemophilia (e.g., hemophilia A or hemophilia B) comprising, administering or delivering any one or more of the gRNAs, donor construct (e.g., bidirectional construct comprising a sequence encoding Factor IX), and RNA-guided DNA binding agents (e.g., Cas nuclease) described herein to a subject in need thereof. In some embodiments, the guide RNA comprises a guide sequence that contains at least 15, 16, 17, 18, 19, or 20 contiguous nucleotides that are capable of binding to a region within intron 1 of human albumin locus (SEQ ID NO: 1). In some embodiments, the guide RNA comprises at least 15, 16, 17, 18, 19, or 20 contiguous nucleotides of a sequence selected from the group consisting of SEQ ID NOs: 2-33. In some embodiments, the guide RNA comprises a sequence that is at least 95%, 90%, 85%, 80%, or 75% identical to a sequence selected from the group consisting of SEQ ID NOs: 2-33. In some embodiments, the guide RNAs disclosed herein comprise a guide sequence selected from the group consisting of SEQ ID NO: 2, 8, 13, 19, 28, 29, 31, 32, 33. In some embodiments, the guide RNAs disclosed herein comprise a guide sequence at least 17, 18, 19, or 20 contiguous nucleotides of a sequence selected from the group consisting of SEQ ID NOs: 2, 8, 13, 19, 28, 29, 31, 32, 33. In some embodiments, the guide RNAs disclosed herein comprise a guide sequence selected from the group consisting of SEQ ID NOs: 34, 40, 45, 51, 60, 61, 63, 64, 65, 66, 72, 77, 83, 92, 93, 95, 96, and 97. In some embodiments, the guide RNAs disclosed herein comprise a guide sequence that is at least 95%, 90%, 85%, 80%, or 75% identical to a sequence selected from the group consisting of SEQ ID NOs: 2-33. In some embodiments, the guide RNAs disclosed herein comprise a guide sequence that is at least 17, 18, 19, or 20 contiguous nucleotides of a sequence selected from the group consisting of SEQ ID NOs: 2-33. In some embodiments, the guide RNAs disclosed herein comprise a guide sequence that is selected from the group consisting of SEQ ID NOs: 34-97. In some embodiments, the donor construct is a bidirectional construct that comprises a sequence encoding a heterologous polypeptide. In some embodiments, the host cell is a liver cell, or the population of host cells are liver cells, such as hepatocytes.

[0220] As used herein, “hemophilia” refers to a disorder caused by a missing or defective Factor IX gene or polypeptide. Hemophilia also refers to a disorder caused by a missing or defective Factor VIII gene or polypeptide. The disorder includes conditions that are inherited and/or acquired (e.g., caused by a spontaneous mutation in the gene), and includes hemophilia A and hemophilia B. Hemophilia A is caused by Factor VIII deficiency. Hemophilia B is caused by Factor IX deficiency. In some embodiments, the defective Factor IX gene or polypeptide results in reduced Factor IX level in the plasma and/or a reduced coagulation activity of Factor IX. As used herein, hemophilia includes mild, moderate, and severe hemophilia. For example, individuals with less than about 1% active factor are classified as having severe hemophilia, those with about 1-5% active factor have moderate hemophilia, and those with mild hemophilia have between about 5-40% of normal levels of active clotting factor.

[0221] In some embodiments, the donor construct comprises a sequence encoding Factor IX, wherein the Factor IX sequence is wild type Factor IX. In some embodiments, the sequence encodes a variant of Factor IX. For example, the variant can possess increased coagulation activity than wild type Factor IX. For example, the variant Factor IX can comprise one or mutations, such as an amino acid substitution in position R338 (e.g., R338L) relative to wild-type Factor IX. In some embodiments, the sequence encodes a Factor IX variant that is 80%, 85%, 90%, 93%, 95%, 97%, 99% identical to wild-type Factor IX, having at least 80%, 85%, 90%, 92%, 94%, 96%, 98%, 99%, 100%, or more, activity as compared to wild type Factor IX. In some embodiments, the sequence encodes a fragment of Factor IX, wherein the fragment possesses at least 80%, 85%, 90%, 92%, 94%, 96%, 98%, 99%, 100%, or more, activity as compared to wild type Factor IX.

[0222] In some embodiments, the donor construct comprises a sequence encoding a Factor IX variant, wherein the Factor IX variant activates coagulation in the absence of its cofactor, Factor VIII (expression results in therapeutically relevant FVIII mimetic activity). Such Factor IX variants can further maintain the activity of wild type Factor IX. For example, such a Factor IX variant can comprise an amino acid substation at position L6, V181, K265, I383, E185, or a combination thereof relative to wild type Factor IX. For example, such a Factor IX variant can comprise an L6F mutation, a V1811 mutation, a K265A mutation, an 1383V mutation, an E185D mutation, or a combination thereof relative to wild type Factor IX.

[0223] The compositions and methods of the present disclosure are useful for efficient insertion of a heterologous gene of interest and safe expression of the heterologous polypeptide (e.g., a therapeutic polypeptide). In some embodiments, the polypeptide is a secreted polypeptide. In some embodiments, the polypeptide is one in which its function is normally effected (e.g., functionally active) as a secreted polypeptide. A “secreted polypeptide” as used herein refers to a protein that is secreted by the cell and/or is functionally active as a soluble extracellular protein.

[0224] In some embodiments, the polypeptide is an intracellular polypeptide. In some embodiments, the polypeptide is one in which its function is normally effected (e.g., functionally active) inside a cell. An “intracellular polypeptide” as used herein refers to a protein that is not secreted by the cell, including soluble cytosolic polypeptides. One or more IRES and/or self cleaving peptide sequences may flank an intracellular polypeptide, e.g. at or near an end of the polypeptide, such an amino terminal end of the polypeptide.

[0225] In some embodiments, the polypeptide is a wild-type polypeptide. In some embodiments, the polypeptide is variant (e.g., mutant) polypeptide (e.g., a hyperactive mutant of a wild-type polypeptide). In some embodiments, the polypeptide is a liver protein. In some embodiments, the polypeptide is a non-liver protein. In some embodiments, the polypeptide is Factor IX, or a variant thereof. In some embodiments, the liver polypeptide is, for example, a polypeptide to address a liver disorder such as, without limitation, tyrosinemia. Wilson's disease, Tay-Sachs disease, hyperbilirubinema (Crigler-Najjar), acute intermittent porphyria, citrullinemia type 1, progressive familiar intrahepatic cholestasis, or maple syrup urine disease.

[0226] In some embodiments, expression of the polypeptide by the host cell (whether in vitro or in vivo) is increased by at least 2%, 3%, 4%, 5%, 6%, 7%, 8%, 9%, 10%, 15%, 20%, 25%, 30%, 35%, 40%, 45%, 50%, 55%, 60%, 65%, 70%, or more relative to a level expressed by the host cell prior to providing the compositions disclosed herein. In additional embodiments, expression of the heterologous polypeptide may be increased to at least detectable levels or therapeutically effective levels.

[0227] In some embodiments, expression of the polypeptide by the host cell (whether in vitro or in vivo) is increased to at least 2%, 3%, 4%, 5%, 6%, 7%, 8%, 9%, 10%, 15%, 20%, 25%, 30%, 35%, 40%, 45%, 50%, 55%, 60%, 65%, 70%, 75%, or more, of a known normal level (e.g., a level of a polypeptide in a healthy subject).

[0228] In some embodiments, expression of the polypeptide by the host cell (whether in vitro or in vivo) is increased to at least about 10 μg/ml, 15 μg/ml, 20 μg/ml, 25 μg/ml, 30 μg/ml, 35 μg/ml, 40 μg/ml, 45 μg/ml, 50 μg/ml, 55 μg/ml, 60 μg/ml, 65 μg/ml, 70 μg/ml, 75 μg/ml, 80 μg/ml, 85 μg/ml, 90 μg/ml, 95 μg/ml, 100 μg/ml, 120 μg/ml, 140 μg/ml, 160 μg/ml, 180 μg/ml, 200 μg/ml, 225 μg/ml, 250 μg/ml, 275 μg/ml, 300 μg/ml, 325 μg/ml. 350 μg/ml, 400 μg/ml, 450 μg/ml, 500 μg/ml, 550 μg/ml, 600 μg/ml, 650 μg/ml, 700 μg/ml, 750 μg/ml, 800 μg/ml, 850 μg/ml. 900 μg/ml, 1000 μg/ml, 1100 μg/ml, 1200 μg/ml, 1300 μg/ml, 1400 μg/ml. 1500 μg/ml, 1600 μg/ml, 1700 μg/ml, 1800 μg/ml, 1900 μg/ml, 2000 μg/ml, or more, as determined, e.g., in the cell, plasma, and/or serum of a subject. Methods of detecting and measuring polypeptide levels in various samples are well known in the art.

[0229] In some embodiments, compositions and methods of the present disclosure are useful for treating a liver-associated disease. As used herein, a “liver-associated disease” refers to diseases that cause damage to the liver tissue directly, diseases that result from damage to the liver tissue, and/or disorders of non-liver organs or tissue that resulted from a defect in the liver. Examples of liver-associated disease include, without limitation, tyrosinemia, Wilson's disease, Tay-Sachs disease, hyperbilirubinema (Crigler-Najjar), acute intermittent porphyria, citrullinemia type 1, progressive familiar intrahepatic cholestasis, and maple syrup urine disease.

[0230] As described herein, any one or more of the guide RNA disclosed herein, RNA-guided DNA binding agent, and donor construct comprising a transgene, can be delivered using any suitable delivery system and method known in the art. The compositions can be delivered in vitro or in vivo simultaneously or in any sequential order. In some embodiments, the donor construct, guide RNA, and RNA-guided DNA binding agent can be delivered in vitro or in vivo simultaneously, e.g., in one vector, two vectors, individual vectors, one LNP, two LNPs, individual LNPs, or a combination thereof. In some embodiments, the donor construct can be delivered in vivo or in vitro, as a vector and/or associated with a LNP, prior to (e.g., about 1, 2, 3, 4, 5, 6, 7, 8, 9, 10, 11, 12, 13, 14, or more days) delivering the guide RNA and/or RNA-guided DNA binding agent, as a vector and/or associated with a LNP singly or together as a ribonucleoprotein (RNP). As a further example, the guide RNA and RNA-guided DNA binding agent, as a vector and/or associated with a LNP singly or together as a ribonucleoprotein (RNP), can be delivered in vivo or in vitro, prior to (e.g., about 1, 2, 3, 4, 5, 6, 7, 8, 9, 10, 11, 12, 13, 14, or more days) delivering the construct, as a vector and/or associated with a LNP. In some embodiments, the guide RNA and RNA-guided DNA binding agent are associated with an LNP and delivered to the host cell prior to delivering the donor construct.

[0231] In some embodiments, the donor construct comprises a sequence encoding Factor IX, or variants thereof. For example, the variant possesses increased activity than wild type polypeptide. In some embodiments, the sequence encodes a polypeptide variant that is 80%, 85%, 90%, 93%, 95%, 97%, 99% identical to a wild-type polypeptide sequence, having at least 80%, 85%, 90%, 92%, 94%, 96%, 98%, 99%, 100%, or more, activity as compared to wild type polypeptide. In some embodiments, the sequence encodes a fragment of a wild type polypeptide, wherein the fragment possesses at least 80%, 85%, 90%, 92%, 94%, 96%, 98%, 99%, 100%, or more, activity as compared to wild type polypeptide.

[0232] In some embodiments, a single administration of a donor construct comprising a heterologous gene, guide RNA, and RNA-guided DNA binding agent is sufficient to increase expression of a polypeptide of interest to a desirable level. In other embodiments, more than one administration of a composition comprising a donor construct comprising a heterologous gene, guide RNA, and RNA-guided DNA binding agent may be beneficial to maximize therapeutic effects.

[0233] In some embodiments, the guide RNAs, RNA-guided DNA binding agent, and donor construct are administered individually or in any combination intravenously. In some embodiments, the guide RNAs, RNA-guided DNA binding agent, and donor construct are administered individually or in any combination into the hepatic circulation.

[0234] In some embodiments, the host or subject is a mammal. In some embodiments, the host or subject is a human. In some embodiments, the host or subject is a rodent (e.g., mouse).

[0235] This description and exemplary embodiments should not be taken as limiting. For the purposes of this specification and appended claims, unless otherwise indicated, all numbers expressing quantities, percentages, or proportions, and other numerical values used in the specification and claims, are to be understood as being modified in all instances by the term “about.” to the extent they are not already so modified. Accordingly, unless indicated to the contrary, the numerical parameters set forth in the following specification and attached claims are approximations that may vary depending upon the desired properties sought to be obtained. At the very least, and not as an attempt to limit the application of the doctrine of equivalents to the scope of the claims, each numerical parameter should at least be construed in light of the number of reported significant digits and by applying ordinary rounding techniques.

### EXAMPLES

[0236] The following examples are provided to illustrate certain disclosed embodiments and are not to be construed as limiting the scope of this disclosure in any way.

### Example 1—Materials and Methods

### Cloning and Plasmid Preparation

[0237] A bidirectional insertion construct flanked by AAV2 ITRs was synthesized and cloned into pUC57-Kan by a commercial vendor. The resulting construct (P00147) was used as the parental cloning vector for other vectors. The other insertion constructs (without ITRs) were also commercially synthesized and cloned into pUC57. Purified plasmid was digested with BglII restriction enzyme (New England BioLabs, cat #R0144S), and the insertion constructs were cloned into the parental vector. Plasmid was propagated in Stb13™ Chemically Competent E. coli (Thermo Fisher, Cat #C737303).

### AAV Production

[0238] Triple transfection in HEK293 cells was used to package genomes with constructs of interest for AAV8 and AAV-DJ production and resulting vectors were purified from both lysed cells and culture media through iodixanol gradient ultracentrifugation method (See, e.g., Lock et al., Hum Gene Ther. 2010 October: 21 (10): 1259-71). The plasmids used in the triple transfection that contained the genome with constructs of interest are referenced in the Examples by a “PXXXX” number, see also e.g., Table 9. Isolated AAV was dialyzed in storage buffer (PBS with 0.001% Pluronic F68). AAV titer was determined by qPCR using primers/probe located within the ITR region.

In Vitro Transcription (“IVT”) of Nuclease mRNA

[0239] Capped and polyadenylated Streptococcus pyogenes (“Spy”) Cas9 mRNA containing N1-methyl pseudo-U was generated by in vitro transcription using a linearized plasmid DNA template and T7 RNA polymerase. Generally, plasmid DNA containing a T7 promoter and a 100 nt poly (A/T) region was linearized by incubating at 37° C. with XbaI to complete digestion followed by heat inactivation of XbaI at 65° C. The linearized plasmid was purified from enzyme and buffer salts. The IVT reaction to generate Cas9 modified mRNA was incubated at 37° C. for 4 hours in the following conditions: 50 ng/μL linearized plasmid: 2 mM each of GTP, ATP, CTP, and N1-methyl pseudo-UTP (Trilink); 10 mM ARCA (Trilink); 5 U/μL T7 RNA polymerase (NEB); 1 U/μL Murine Rnase inhibitor (NEB); 0.004 U/μL Inorganic E. coli pyrophosphatase (NEB); and 1× reaction buffer. TURBO Dnase (ThermoFisher) was added to a final concentration of 0.01 U/μL, and the reaction was incubated for an additional 30 minutes to remove the DNA template. The Cas9 mRNA was purified using a MegaClear Transcription Clean-up kit according to the manufacturer's protocol (ThermoFisher). Alternatively, the Cas9 mRNA was purified using LiCl precipitation, ammonium acetate precipitation, and sodium acetate precipitation or using a LiCl precipitation method followed by further purification by tangential flow filtration. The transcript concentration was determined by measuring the light absorbance at 260 nm (Nanodrop), and the transcript was analyzed by capillary electrophoresis by Bioanlayzer (Agilent).

[0240] The Cas9 mRNAs below comprise Cas9 ORF SEQ ID NO:703 or SEQ ID NO: 704 or a sequence of Table 24 of PCT/US2019/053423 (which is hereby incorporated by reference).

Lipid Formulations for Delivery of Cas9 mRNA and gRNA

[0241] Cas9 mRNA and gRNA were delivered to cells and animals utilizing lipid formulations comprising ionizable lipid ((9Z,12Z)-3-((4,4-bis(octyloxy) butanoyl)oxy)-2-((((3-(diethylamino) propoxy) carbonyl)oxy)methyl) propyl octadeca-9,12-dienoate, also called 3-((4,4-bis(octyloxy) butanoyl)oxy)-2-((((3-(diethylamino) propoxy) carbonyl)oxy)methyl) propyl (9Z,12Z)-octadeca-9,12-dienoate), cholesterol, DSPC, and PEG2k-DMG.

[0242] For experiments utilizing pre-mixed lipid formulations (referred to herein as “lipid packets”), the components were reconstituted in 100% ethanol at a molar ratio of ionizable lipid:cholesterol:DSPC:PEG2k-DMG of 50:38:9:3, prior to being mixed with RNA cargos (e.g., Cas9 mRNA and gRNA) at a lipid amine to RNA phosphate (N:P) molar ratio of about 6.0, as further described herein.

[0243] For experiments utilizing the components formulated as lipid nanoparticles (LNPs), the components were dissolved in 100% ethanol at various molar ratios. The RNA cargos (e.g., Cas9 mRNA and gRNA) were dissolved in 25 mM citrate, 100 mM NaCl, pH 5.0, resulting in a concentration of RNA cargo of approximately 0.45 mg/mL.

[0244] For the experiments described in Example 2, the LNPs were formed by microfluidic mixing of the lipid and RNA solutions using a Precision Nanosystems NanoAssemblr™ Benchtop Instrument, according to the manufacturer's protocol. A 2:1 ratio of aqueous to organic solvent was maintained during mixing using differential flow rates. After mixing, the LNPs were collected, diluted in water (approximately 1:1 v/v), held for 1 hour at room temperature, and further diluted with water (approximately 1:1 v/v) before final buffer exchange. The final buffer exchange into 50 mM Tris, 45 mM NaCl, 5% (w/v) sucrose. pH 7.5 (TSS) was completed with PD-10 desalting columns (GE). If required, formulations were concentrated by centrifugation with Amicon 100 kDa centrifugal filters (Millipore). The resulting mixture was then filtered using a 0.2 μm sterile filter. The final LNP was stored at −80° C. until further use. The LNPs were formulated at a molar ratio of ionizable lipid:cholesterol:DSPC:PEG2k-DMG of 45:44:9:2, with a lipid amine to RNA phosphate (N:P) molar ratio of about 4.5, and a ratio of gRNA to mRNA of 1:1 by weight.

[0245] For the experiments described other examples, the LNPs were prepared using a cross-flow technique utilizing impinging jet mixing of the lipid in ethanol with two volumes of RNA solutions and one volume of water. The lipid in ethanol was mixed through a mixing cross with the two volumes of RNA solution. A fourth stream of water was mixed with the outlet stream of the cross through an inline tee (See WO2016010840 FIG. 2.). The LNPs were held for 1 hour at room temperature, and further diluted with water (approximately 1:1 v/v). Diluted LNPs were concentrated using tangential flow filtration on a flat sheet cartridge (Sartorius, 100 kD MWCO) and then buffer exchanged by diafiltration into 50 mM Tris, 45 mM NaCl, 5% (w/v) sucrose, pH 7.5 (TSS). Alternatively, the final buffer exchange into TSS was completed with PD-10 desalting columns (GE). If required, formulations were concentrated by centrifugation with Amicon 100 kDa centrifugal filters (Millipore). The resulting mixture was then filtered using a 0.2 μm sterile filter. The final LNP was stored at 4° C. or −80° C. until further use. The LNPs were formulated at a molar ratio of ionizable lipid:cholesterol:DSPC:PEG2k-DMG of 50:38:9:3, with a lipid amine to RNA phosphate (N:P) molar ratio of about 6.0, and a ratio of gRNA to mRNA of 1:1 by weight.

Cell Culture and In Vitro Delivery of Cas9 mRNA, gRNA, and Insertion Constructs

### Hepa1-6 Cells

[0246] Hepa 1-6 cells were plated at density of 10,000 cells/well in 96-well plates. 24 hours later, cells were treated with LNP and AAV. Before treatment the media was aspirated off from the wells. LNP was diluted to 4 ng/ul in DMEM+10% FBS media and further diluted to 2 ng/ul in 10% FBS (in DMEM) and incubated at 37° C. for 10 min (at a final concentration of 5% FBS). Target MOI of AAV was 1e6, diluted in DMEM+10% FBS media. 50 μl of the above diluted LNP at 2 ng/ul was added to the cells (delivering a total of 100 ng of RNA cargo) followed by 50 μl of AAV. The treatment of LNP and AAV were minutes apart. Total volume of media in cells was 100 μl. After 72 hours post-treatment and 30 days post-treatment, supernatant from these treated cells were collected for human FIX ELISA analysis as described below.

### Primary Hepatocytes

[0247] Primary mouse hepatocytes (PMH), primary cyno hepatocytes (PCH) and primary human hepatocytes (PHH) were thawed and resuspended in hepatocyte thawing medium with supplements (ThermoFisher) followed by centrifugation. The supernatant was discarded, and the pelleted cells resuspended in hepatocyte plating medium plus supplement pack (ThermoFisher). Cells were counted and plated on Bio-coat collagen I coated 96-well plates at a density of 33,000 cells/well for PHH and 50,000 cells/well for PCH and 15,000 cells/well for PMH. Plated cells were allowed to settle and adhere for 5 hours in a tissue culture incubator at 37° C. and 5% CO₂ atmosphere. After incubation cells were checked for monolayer formation and were washed thrice with hepatocyte maintenance prior and incubated at 37° C.

[0248] For experiments utilizing lipid packet delivery, Cas9 mRNA and gRNA were each separately diluted to 2 mg/ml in maintenance media and 2.9 μl of each were added to wells (in a 96-well Eppendorf plate) containing 12.5 μl of 50 mM sodium citrate, 200 mM sodium chloride at pH 5 and 6.9 μl of water. 12.5 μl of lipid packet formulation was then added, followed by 12.5 μl of water and 150 μl of TSS. Each well was diluted to 20 ng/μl (with respect to total RNA content) using hepatocyte maintenance media, and then diluted to 10 ng/μl (with respect to total RNA content) with 6% fresh mouse serum. Media was aspirated from the cells prior to transfection and 40 μl of the lipid packet/RNA mixtures were added to the cells, followed by addition of AAV (diluted in maintenance media) at an MOI of 1e5. Media was collected 72 hours post-treatment for analysis and cells were harvested for further analysis, as described herein

### Luciferase Assays

[0249] For experiments involving NanoLuc detection in cell media, one volume of Nano-Glo® Luciferase Assay Substrate was combined with 50 volumes of Nano-Glo® Luciferase Assay Buffer. The assay was run on a Promega Glomax runner at an integration time of 0.5 sec using 1:10 dilution of samples (50 μl of reagent+40 μl water+10 μl cell media).

[0250] For experiments involving detection of the HiBit tag in cell media, LgBiT Protein and Nano-GloR HiBiT Extracellular Substrate were diluted 1:100 and 1:50, respectively, in room temperature Nano-GloR HiBIT Extracellular Buffer. The assay was run on a Promega Glomax runner at an integration time of 1.0 sec using 1:10 dilution of samples (50 μl of reagent+40 μl water+10 μl cell media).

In Vivo Delivery of LNP and/or AAV

[0251] Mice were dosed with AAV, LNP, both AAV and LNP, or vehicle (PBS+0.001% Pluronic for AAV vehicle, TSS for LNP vehicle) via the lateral tail vein. AAV were administered in a volume of 0.1 mL per animal with amounts (vector genomes/mouse, “vg/ms”) as described herein. LNPs were diluted in TSS and administered at amounts as indicated herein, at about 5 μl/gram body weight. Typically, mice were injected first with AAV and then with LNP, if applicable. At various times points post-treatment, serum and/or liver tissue was collected for certain analyses as described further below.

Human Factor IX (hFIX) ELISA Analysis

[0252] For in vitro studies, total human Factor IX levels secreted in cell media were determined using a Human Factor IX ELISA Kit (Abcam, Cat #ab188393) according to manufacturer's protocol. Secreted hFIX levels were quantitated off a standard curve using 4 parameter logistic fit and expressed as ng/ml of media.

[0253] For in vivo studies, blood was collected and the serum or plasma was isolated as indicated. The total human Factor IX levels were determined using a Human Factor IX ELISA Kit (Abcam, Cat #ab188393) according to manufacturer's protocol. Serum or plasma hFIX levels were quantitated off a standard curve using 4 parameter logistic fit and expressed as μg/mL of serum.

### Next-Generation Sequencing (“NGS”) and Analysis for On-Target Cleavage Efficiency

[0254] Deep sequencing was utilized to identify the presence of insertions and deletions introduced by gene editing, e.g., within intron 1 of albumin. PCR primers were designed around the target site and the genomic area of interest was amplified. Primer sequence design was done as is standard in the field.

[0255] Additional PCR was performed according to the manufacturer's protocols (Illumina) to add chemistry for sequencing. The amplicons were sequenced on an Illumina MiSeq instrument. The reads were aligned to the reference genome after eliminating those having low quality scores. The resulting files containing the reads were mapped to the reference genome (BAM files), where reads that overlapped the target region of interest were selected and the number of wild type reads versus the number of reads which contain an insertion or deletion (“indel”) was calculated.

[0256] The editing percentage (e.g., the “editing efficiency” or “percent editing”) is defined as the total number of sequence reads with insertions or deletions (“indels”) over the total number of sequence reads, including wild type.

### In Situ Hybridization Analysis

[0257] BaseScope (ACDbio, Newark, CA) is a specialized RNA in situ hybridization technology that can provide specific detection of exon junctions, e.g., in a hybrid mRNA transcript that contains an insertion transgene (hFIX) and coding sequence from the site of insertion (exon 1 of albumin). BaseScope was used to measure the percentage of liver cells expressing the hybrid mRNA.

[0258] To detect the hybrid mRNA, two probes against the hybrid mRNAs that may arise following insertion of a bidirectional construct were designed by ACDbio (Newark, CA). One of the probes was designed to detect a hybrid mRNA resulting from insertion of the construct in one orientation, while the other probe was designed to detect a hybrid mRNA resulting from insertion of the construct in the other orientation. Livers from different groups of mice were collected and fresh-frozen sectioned. The BaseScope assay, using a single probe or pooled probes was performed according to the manufacture's protocol. Slides were scanned and analyzed by the HALO software. The background (saline treated group) of this assay was 0.58%.

### Example 2—In Vitro Testing of Insertion Templates for Intron 1 of Albumin with and without Homology Arms

[0259] In this Example, Hepa1-6 cells were cultured and treated with AAV harboring insertion templates of various forms (e.g., having either a single-stranded genome (“ssAAV”) or a self-complementary genome (“scAAV”)), in the presence or absence of LNP delivering Cas9 mRNA and G000551 e.g., as described in Example 1 (n=3). The AAV and LNP were prepared as described in Example 1. Following treatment, the media was collected for human Factor IX levels as described in Example 1.

[0260] Hepa1-6 cells are an immortalized mouse liver cell line that continues to divide in culture. As shown in FIG. 2 (72 hour post-treatment time point), the vector (scAAV derived from plasmid P00204) comprising 200 bp homology arms resulted in detectable expression of hFIX, e.g., following insertion into intron 1 of albumin in the cycling cells. Use of the AAV vectors derived from P00123 (scAAV lacking homology arms) and P00147 (SSAAV bidirectional construct lacking homology arms) did not result in detectable expression of hFIX in this experiment. The cells were kept in culture and these results were confirmed when re-assayed at 30 days post-treatment (data not shown).

### Example 3—In Vivo Testing of Insertion Templates for Intron 1 of Albumin with and without Homology Arms

[0261] In this Example, mice were treated with AAV derived from the same plasmids (P00123, P00204, and P00147) as tested in vitro in Example 2. The dosing materials were prepared and dosed as described in Example 1. C57B1/6 mice were dosed (n=5 for each group) with 3e11 vector genomes each (vg/ms) followed by LNP comprising G000551 (“G551”) at a dose of 4 mg/kg (with respect to total RNA cargo content). Four weeks post dose, the animals were euthanized and liver tissue and sera were collected for editing and hFIX expression, respectively.

[0262] As shown in FIG. 3A and Table 12, liver editing levels of ˜60% were detected in each group of animals treated with LNP comprising gRNA targeting intron 1 of murine albumin. However, despite robust and consistent levels of editing in each treatment group, animals receiving the ssAAV vector without homology arms (vector derived from P00147) in combination with LNP treatment resulted in the highest level of hFIX expression in serum (FIG. 3B and Table 13).

TABLE 12
Indel %

| Template | Average Indel (%) | St. Dev Indel (%) |
|---|---|---|
| scAAV Blunt (P00123) | 66.72 | 4.09 |
| ssAAV Blunt (P00147) | 68.10 | 2.27 |
| ssAAV HR (P00204) | 70.16 | 3.68 |
| LNP only | 68.24 | 6.47 |
| Vehicle | 0.28 | 0.08 |

TABLE 13
Factor IX Levels (ug/mL)

| | Average Factor IX | St. Dev Factor IX |
|---|---|---|
| Template | (ug/mL) | (ug/mL) |
| scAAV Blunt (P00123) | 0.75 | 0.28 |
| ssAAV Blunt (P00147) | 2.92 | 1.04 |
| ssAAV HR (P00204) | 0.96 | 0.35 |
| LNP only | 0 | 0 |
| Vehicle | 0 | 0 |

### Example 4—In Vivo Testing of ssAAV Insertion Templates for Intron 1 of Albumin with and without Homology Arms

[0263] The experiment described in this Example examined the effect of incorporating homology arms into ssAAV vectors in vivo.

[0264] The dosing materials used in this experiment were prepared and dosed as described in Example 1. C57B1/6 mice were dosed (n=5 for each group) with 3e11 vg/ms followed by LNP comprising G000666 (“G666”) or G000551 (“G551”) at a dose of 0.5 mg/kg (with respect to total RNA cargo content). Four weeks post dose, the animals sera was collected for hFIX expression.

[0265] As shown in FIG. 4A and Table 14, use of the ssAAV vectors with asymmetrical homology arms (300/600 bp arms, 300/2000 bp arms, and 300/1500 bp arms for vectors derived from plasmids P00350, P00356, and P00362, respectively) for insertion into the albumin intron 1 site targeted by G551 resulted in levels of circulating hFIX that were below the lower limit of detection for the assay. However, use of the ssAAV vector (derived from P00147) without homology arms and having two hFIX open reading frames (ORF) in a bidirectional orientation resulted in detectable levels of circulating hFIX in each animal.

[0266] Similarly, use of the ssAAV vectors with symmetrical homology arm from plasmids P00353 and P00354, respectively) for insertion into the albumin intron 1 site targeted by G666 resulted in lower but detectable levels, as compared to use of the bidirectional vector without homology arms (derived from P00147) (see FIG. 4B and Table 15).

TABLE 14
hFIX Serum Levels

| | Average Serum FIX | St. Dev Serum FIX |
|---|---|---|
| AAV | (ug/mL) | (ug/mL) |
| P00147 | 5.13 | 1.31 |
| P00350 | −0.22 | 0.08 |
| P00356 | −0.23 | 0.04 |
| P00362 | −0.09 | 0.16 |

TABLE 15
hFIX Serum Levels

| | Average Serum FIX | St. Dev Serum FIX |
|---|---|---|
| AAV | (ug/mL) | (ug/mL) |
| P00147 | 7.72 | 4.67 |
| P00353 | 0.20 | 0.23 |
| P00354 | 0.46 | 0.26 |

### Example 5—In Vitro Screening of Bidirectional Constructs Across 20 Target Sites in Intron 1 of Albumin in Primary Mouse Hepatocytes

[0267] Having demonstrated that bidirectional constructs lacking homology arms outperformed vectors with other configurations for insertion into intron 1 of albumin, the experiment described in this Example examined the effects of ald the splice acceptors. These varied bidirectional constructs were tested across a panel of target sites utilizing 20 different gRNAs targeting intron 1 of murine albumin in primary mouse hepatocytes (PMH).

[0268] The ssAAV and lipid packet delivery materials tested in this Example were prepared and delivered to PMH as described in Example 1, with the AAV at an MOI of 1e5. Following treatment, isolated genomic DNA and cell media was collected for editing and transgene expression analysis, respectively. Each of the vectors comprised a reporter that can be measured through luciferase-based fluorescence detection as described in Example 1, plotted in FIG. 5C as relative luciferase units (“RLU”). For example, the AAV vectors comprising the hFIX ORFs contained a HiBit peptide fused at their 3′ ends, and the AAV vector comprising only reporter genes comprised a NanoLuc ORF (in addition to GFP). Schematics of each of the vectors tested are provided in FIG. 5A. The gRNAs tested are shown in FIG. 5B and FIG. 5C, using a shortened number for those listed in Table 5 (e.g., where the leading zeros are omitted, for example where “G551” corresponds to “G000551” in Table 5).

[0269] As shown in FIG. 5B and Table 16, consistent but varied levels of editing were detected for each of the treatment groups across each combination tested. Transgene expression using various combinations of template and guide RNA is shown in FIG. 5C. As shown in FIG. 5D, a significant level of indel formation did not necessarily result in more efficient expression of the transgenes. Not all guides that generated in significant indels resulted in high levels of proteins with the same insertion template as measured by the relative luciferase activities. Using P00411- and P00418-derived templates, the R2 values were 0.54 and 0.37 between indel and luciferase activity, respectively, when guides with less than 10% editing are not included (FIG. 5D). Interestingly, despite differing ORFs and splice acceptors, the relative levels of expression as measured in RLUs was consistent between the three vectors tested, demonstrating the robustness, reproducibility and modularity of the bidirectional construct system, e.g., for use in inserting transgenes of interest into intron 1 of albumin (see FIG. 5C and Table 17). The mouse albumin splice acceptor and human FIX splice acceptor each resulted in effective transgene expression.

TABLE 16
% Indel

| | P00411 | | P00418 | | P00415 | |
|---|---|---|---|---|---|---|
| | Average | St. Dev | Average | St. Dev | Average | St. Dev |
| | Indel | Indel | Indel | Indel | Indel | Indel |
| Guide ID | (%) | (%) | (%) | (%) | (%) | (%) |
| G000551 | 67.4 | 1.42 | 70.67 | 2.29 | 66.73 | 4.90 |
| G000552 | 90.93 | 0.15 | 91.10 | 2.43 | 90.37 | 1.01 |
| G000553 | 77.80 | 3.83 | 77.47 | 1.87 | 80.50 | 0.85 |
| G000554 | 72.37 | 6.49 | 70.53 | 3.16 | 70.60 | 2.91 |
| G000555 | 35.37 | 2.63 | 35.77 | 9.34 | 40.47 | 4.75 |
| G000666 | 62.47 | 3.87 | 50.90 | 19.41 | 65.90 | 3.99 |
| G000667 | 30.57 | 2.73 | 25.30 | 3.67 | 31.67 | 2.29 |
| G000668 | 63.60 | 2.02 | 66.65 | 4.60 | 68.30 | 4.90 |
| G000669 | 19.10 | 2.51 | 19.33 | 1.53 | 18.70 | 1.25 |
| G000670 | 47.80 | 3.27 | 49.10 | 4.42 | 51.97 | 2.06 |
| G011722 | 4.20 | 0.72 | 4.27 | 1.20 | 4.20 | 0.26 |
| G011723 | 5.63 | 1.27 | 6.07 | 0.15 | 5.93 | 0.15 |
| G011724 | 6.10 | 1.28 | 8.50 | 2.69 | 7.13 | 1.27 |
| G011725 | 1.93 | 0.29 | 2.60 | 0.79 | 2.53 | 0.65 |
| G011726 | 10.73 | 1.46 | 11.70 | 0.50 | 12.43 | 1.33 |
| G011727 | 14.20 | 1.56 | 14.80 | 2.36 | 16.20 | 2.69 |
| G011728 | 10.55 | 1.20 | 13.65 | 0.92 | 15.50 | 1.56 |
| G011729 | 5.00 | 0.10 | 5.63 | 0.25 | 6.00 | 1.01 |
| G011730 | 7.83 | 0.97 | 9.13 | 0.59 | 7.33 | 0.59 |
| G011731 | 23.70 | 0.66 | 25.27 | 1.21 | 24.87 | 1.01 |
| AAV Only | 0.15 | 0.07 | 0.05 | 0.07 | 0.10 | 0.00 |

TABLE 17
Luciferase Expression

| | P00411 | | P00418 | | P00415 | |
|---|---|---|---|---|---|---|
| | Average | St. Dev | Average | St. Dev | Average | St. Dev |
| | Luciferase | Luciferase | Luciferase | Luciferase | Luciferase | Luciferase |
| Guide ID | (RLU) | (RLU) | (RLU) | (RLU) | (RLU) | (RLU) |
| G000551 | 58000.00 | 4331.28 | 41800.00 | 2165.64 | 78633.33 | 20274.70 |
| G000552 | 95700.00 | 10573.08 | 80866.67 | 27911.35 | 205333.33 | 30664.86 |
| G000553 | 205333.33 | 52993.71 | 177333.33 | 32929.22 | 471666.67 | 134001.00 |
| G000554 | 125333.33 | 55949.38 | 91933.33 | 19194.10 | 232666.67 | 67002.49 |
| G000555 | 59933.33 | 11566.04 | 77733.33 | 11061.80 | 155666.67 | 15947.83 |
| G000666 | 88500.00 | 28735.87 | 93266.67 | 30861.19 | 313000.00 | 15394.80 |
| G000667 | 75333.33 | 22653.11 | 68966.67 | 27222.11 | 153000.00 | 30805.84 |
| G000668 | 164000.00 | 56320.51 | 133400.00 | 65111.29 | 429000.00 | 120751.80 |
| G000669 | 28933.33 | 11636.29 | 22033.33 | 2413.16 | 46466.67 | 6543.19 |
| G000670 | 162666.67 | 32959.57 | 200000.00 | 33867.39 | 424666.67 | 36473.73 |
| G011722 | 16766.67 | 3384.28 | 8583.33 | 4103.10 | 24000.00 | 8915.16 |
| G011723 | 22733.33 | 7252.82 | 17133.33 | 4905.44 | 26100.00 | 8109.87 |
| G011724 | 17300.00 | 2400.00 | 28033.33 | 9091.94 | 30933.33 | 3365.02 |
| G011725 | 8253.33 | 1163.20 | 8890.00 | 1429.27 | 20366.67 | 13955.05 |
| G011726 | 12223.33 | 3742.54 | 11610.00 | 2490.44 | 14950.00 | 8176.03 |
| G011727 | 35600.00 | 8128.35 | 36300.00 | 12301.22 | 86700.00 | 5023.94 |
| G011728 | 14900.00 | 5011.99 | 22466.67 | 7130.45 | 38166.67 | 13829.08 |
| G011729 | 10460.00 | 2543.95 | 11223.33 | 2220.28 | 26966.67 | 16085.50 |
| G011730 | 14833.33 | 2307.24 | 21700.00 | 8681.59 | 41233.33 | 25687.03 |
| G011731 | 16433.33 | 3274.65 | 22566.67 | 2205.30 | 20756.67 | 13096.20 |
| AAV Only | 217.00 | 15.56 | 215.00 | 15.56 | 207.00 | 1.41 |

### Example 6—In Vivo Screening of Bidirectional Constructs Across Albumin Intron 1 Target Sites

[0270] The ssAAV and LNPs tested in this Example were prepared and delivered to C57Bl/6 mice as described in Example 1 to assess the performance of the bidirectional constructs across target sites in vivo. Four weeks post dose, the animals were euthanized and liver tissue and sera were collected for editing and hFIX expression, respectively.

[0271] In an initial experiment, 10 different LNP formulations containing 10 different gRNA targeting intron 1 of albumin were delivered to mice along with ssAAV derived from P00147. The AAV and LNP were delivered at 3e11 vg/ms and 4 mg/kg (with respect to total RNA cargo content), respectively (n=5 for each group). The gRNAs tested in this experiment are shown in FIG. 6. As shown in FIG. 6 and Table 18 as observed in vitro, a significant level of indel formation was not predictive for insertion or expression of the transgenes.

TABLE 18
hFIX Serum Levels and % Indel

| | Average | St. Dev | Average | St. Dev |
|---|---|---|---|---|
| | Indel | Indel | Luciferase | Luciferase |
| Guide | (%) | (%) | (RLU) | (RLU) |
| G000551 | 75.02 | 1.27 | 3.82 | 3.38 |
| G000555 | 51.18 | 1.19 | 32.56 | 9.05 |
| G000553 | 62.78 | 2.64 | 25.07 | 4.04 |
| G000667 | 52.96 | 4.96 | 32.03 | 6.74 |
| G000554 | 55.24 | 2.28 | 29.48 | 7.34 |
| G000552 | 67.56 | 1.73 | 14.79 | 5.34 |
| G000668 | 43.14 | 5.78 | 26.72 | 7.97 |
| G000669 | 50.68 | 2.97 | 10.70 | 4.43 |
| G000666 | 64.62 | 1.34 | 26.19 | 5.56 |
| G000670 | 55.90 | 1.30 | 30.96 | 8.44 |

[0272] In a separate experiment, a panel of 20 gRNAs targeting the 20 different target sites tested in vitro in Example 5 were tested in vivo. To this end, LNP formulations containing the 20 gRNAs targeting intron 1 of albumin were delivered to mice along with ssAAV derived from P00147. The AAV and LNP were delivered at 3e11 vg/ms and 1 mg/kg (with respect to total RNA cargo content), respectively. The gRNAs tested in this experiment are shown in FIG. 7A and FIG. 7B.

TABLE 19
Editing in the Liver

| | Average Liver Editing | St. Dev Liver Editing |
|---|---|---|
| Guide | (%) | (%) |
| G000551 | 59.48 | 4.02 |
| G000555 | 58.72 | 3.65 |
| G000553 | 51.26 | 2.81 |
| G000554 | 33.04 | 8.76 |
| G000555 | 12.72 | 4.46 |
| G000666 | 53.60 | 4.92 |
| G000667 | 26.74 | 4.98 |
| G000668 | 39.22 | 3.04 |
| G000669 | 33.34 | 4.77 |
| G000670 | 47.50 | 5.58 |
| G011722 | 10.34 | 1.68 |
| G011723 | 4.02 | 0.84 |
| G011724 | 2.46 | 0.64 |
| G011725 | 8.26 | 1.24 |
| G011726 | 6.90 | 1.01 |
| G011727 | 13.33 | 6.43 |
| G011728 | 35.78 | 9.34 |
| G011729 | 4.62 | 1.46 |
| G011730 | 12.68 | 3.14 |
| G011731 | 26.70 | 1.86 |

TABLE 20
Serum hFIX Levels

| | Week 1 | | Week 2 | | Week 4 | |
|---|---|---|---|---|---|---|
| | Average | St. Dev | Average | St. Dev | Average | St. Dev |
| | FIX | FIX | FIX | FIX | FIX | FIX |
| Guide | (ug/mL) | (ug/mL) | (ug/mL) | (ug/mL) | (ug/mL) | (ug/mL) |
| G000551 | 10.88 | 2.74 | 10.25 | 2.51 | 9.39 | 3.48 |
| G000555 | 13.34 | 2.09 | 12.00 | 2.75 | 12.43 | 2.57 |
| G000553 | 17.64 | 4.34 | 20.27 | 6.35 | 15.31 | 2.43 |
| G000554 | 12.79 | 4.99 | 14.29 | 6.09 | 12.74 | 4.93 |
| G000555 | 11.94 | 5.79 | 11.99 | 5.76 | 8.61 | 4.02 |
| G000666 | 21.63 | 1.32 | 20.65 | 1.55 | 17.23 | 0.62 |
| G000667 | 16.77 | 2.86 | 12.35 | 2.85 | 12.57 | 5.60 |
| G000668 | 21.35 | 1.51 | 18.20 | 3.18 | 17.72 | 2.25 |
| G000669 | 5.76 | 2.10 | 6.72 | 2.93 | 3.39 | 0.78 |
| G000670 | 18.18 | 2.17 | 19.16 | 3.05 | 15.49 | 3.61 |
| G011722 | 8.07 | 1.74 | 7.74 | 2.41 | 8.07 | 1.74 |
| G011723 | 2.11 | 0.28 | 1.65 | 0.28 | 2.11 | 0.28 |
| G011724 | 0.92 | 0.43 | 0.60 | 0.30 | 0.92 | 0.43 |
| G011725 | 1.75 | 0.77 | 1.14 | 0.67 | 1.75 | 0.77 |
| G011726 | 0.59 | 0.30 | 1.01 | 0.64 | 0.59 | 0.30 |
| G011727 | 6.71 | 2.80 | 6.90 | 3.68 | 6.71 | 2.80 |
| G011728 | 11.77 | 3.12 | 12.29 | 3.43 | 11.77 | 3.12 |
| G011729 | 0.94 | 0.35 | 0.89 | 0.29 | 0.94 | 0.35 |
| G011730 | 5.93 | 1.77 | 6.33 | 1.73 | 5.93 | 1.77 |
| G011731 | 3.56 | 0.87 | 3.78 | 0.50 | 3.56 | 0.87 |
| AAV Only | 0.00 | 0.00 | 0.00 | 0.00 | 0.00 | 0.00 |
| Vehicle | 0.00 | 0.00 | 0.00 | 0.00 | 0.00 | 0.00 |
| Human Serum | 3.63 | 0.32 | 3.61 | 0.35 | 3.28 | 0.03 |

[0273] As shown, in FIG. 7A and Table 19, varied levels of editing were detected for each of the treatment groups across each LNP/vector combination tested. However, as shown in FIG. 7B and consistent with the in vitro data described in Example 5, higher levels of editing did not necessarily result in higher levels of expression of the transgenes in vivo, indicating a lack of correlation between editing and insertion/expression of the bidirectional constructs. Indeed, very little correlation exists between the amount of editing achieved and the amount of hFIX expression as viewed in the plot provided in FIG. 7D and Table 20. In particular, an R2 value of only 0.34 is calculated between the editing and expression data sets for this experiment, when those gRNAs achieving less than 10% editing are removed from the analysis. Interestingly, as shown in FIG. 7C, a correlation plot is provided comparing the levels of expression as measured in RLU from the in vitro experiment of Example 5 to the transgene expression levels in vivo detected in this experiment, with an R2 value of 0.70, demonstrating a positive correlation between the primary cell screening and the in vivo treatments.

[0274] To assess insertion of the bidirectional construct at the cellular level, liver tissues from treated animals were assayed using an in situ hybridization method (BaseScope), e.g., as described in Example 1. This assay utilized probes that can detect the junctions between the hFIX transgene and the mouse albumin exon 1 sequence, as a hybrid transcript. As shown in FIG. 8A, cells positive for the hybrid transcript were detected in animals that received both AAV and LNP. Specifically, when AAV alone is administered, less than 1.0% of cells were positive for the hybrid transcript. With administration of LNPs comprising G011723, G000551, or G000666, 4.9%, 19.8%, or 52.3% of cells were positive for the hybrid transcript. Additionally, as shown in FIG. 8B, circulating hFIX levels correlated with the number of cells that were positive for the hybrid transcript. Lastly, the assay utilized pooled probes that can detect insertion of the bidirectional hFIX construct in either orientation. However, when a single probe was used that only detects a single orientation, the amount of cells that were positive for the hybrid transcript was about half that detected using the pooled probes (in one example, 4.46% vs 9.68%), suggesting that the bidirectional construct indeed is capable of inserting into intron 1 of albumin in either orientation giving rise to expressed hybrid transcripts that correlate with the amount of transgene expression at the protein level. These data show that the circulating protein levels achieved are dependent on the guide used for insertion.

### Example 7—Timing of AAV and LNP Delivery In Vivo

[0275] In this Example, the timing between delivery of ssAAV comprising the bidirectional hFIX construct and LNP for targeted insertion into intron 1 of albumin was examined.

[0276] The ssAAV and LNPs tested in this Example were prepared and delivered to mice as described in Example 1. The LNP formulation contained G000551 and the bidirectional template was delivered as ssAAV derived from P00147. The AAV and LNP were delivered at 3e11 vg/ms and 4 mg/kg (with respect to total RNA cargo content), respectively (n=5 for each group). A “Template only” cohort received AAV only, and a “PBS” cohort received no AAV or LNP. One cohort received AAV and LNP sequentially (minutes apart) at day 0 (“Template+LNP day 0”); another cohort received AAV at day 0 and LNP at day 1 (“Template+LNP day 1”); and a final cohort received AAV at day 0 and LNP at day 7 (“Template+LNP day 7”). At 1 week, 2 weeks and 6 weeks, plasma was collected for hFIX expression analysis.

[0277] As shown in FIG. 9, hFIX was detected in each cohort at each time assayed, except for the 1 week timepoint for the cohort that received the LNP dose the same day at week 1 post AAV delivery.

### Example 8—Multiple Dosing of LNP Following Delivery of AAV

[0278] In this Example, the effects of repeat dosing of LNP following administration of ssAAV for targeted insertion into intron 1 of albumin was examined.

[0279] The ssAAV and LNPs tested in this Example were prepared and delivered to C57Bl/6 mice as described in Example 1. The LNP formulation contained G000551 and the ssAAV was derived from P00147. The AAV and LNP were delivered at 3e11 vg/ms and 0.5 mg/kg (with respect to total RNA cargo content), respectively (n=5 for each group). A “Template only” cohort received AAV only, and a “PBS” cohort received no AAV or LNP. One cohort received AAV and LNP sequentially (minutes apart) at day 0 with no further treatments (“Template+LNP (1×)” in FIG. 10); another cohort received AAV and LNP sequentially (minutes apart) at day 0 and a second dose at day 7 (“Template+LNP (2×)” in FIG. 10); and a final cohort received AAV and LNP sequentially (minutes apart) at day 0, a second dose of LNP at day 7 and a third dose of LNP at day 14 (“Template+LNP (3×)” in FIG. 10). At 1, 2, 4 and 6 weeks post-administration of AAV, plasma was collected for hFIX expression analysis.

[0280] As shown in FIG. 10, hFIX was detected in each cohort at each time assayed, and multiple subsequent doses of LNP did not significantly increase the amount of hFIX expression.

### Example 9—Durability of hFIX Expression In Vivo

[0281] The durability of hFIX expression following targeted insertion into intron 1 of albumin over time in treated animals was assessed in this Example. To this end, hFIX was measured in the serum of treated animals as part of a one-year durability study.

[0282] The ssAAV and LNPs tested in this Example were prepared and delivered to C57B1/6 mice as described in Example 1. The LNP formulation contained G000551 and the ssAAV was derived from P00147. The AAV was delivered at 3e11 vg/ms and the LNP was delivered at either 0.25 or 1.0 mg/kg (with respect to total RNA cargo content) (n=5 for each group).

[0283] As shown in FIG. 11A and FIG. 11B and Tables 21-22, hFIX expression from intron 1 of albumin was sustained at each time point assessed for both groups out to 12 weeks. A drop in the levels observed at 8 weeks is believed to be due to the variability of the ELISA assay. Serum albumin levels were measured by ELISA at week 2 and week 41, showing that circulating albumin levels are maintained across the study.

TABLE 21
FIX Levels

| | Dose | | | |
|---|---|---|---|---|
| | 0.25 mpk LNP | | 1 mpk LNP | |
| | Average hFIX | StDev hFIX | Average hFIX | StDev hFIX |
| Week | (ug/mL) | (ug/mL) | (ug/mL) | (ug/mL) |
| 2 | 0.48 | 0.21 | 2.24 | 1.12 |
| 4 | 0.55 | 0.18 | 2.82 | 1.67 |
| 8 | 0.40 | 0.17 | 1.72 | 0.77 |
| 12 | 0.48 | 0.20 | 2.85 | 1.34 |
| 20 | 0.48 | 0.27 | 2.45 | 1.26 |
| 41 | 0.79 | 0.49 | 4.63 | 0.95 |

TABLE 22
hFIX Levels

| | Dose | | | |
|---|---|---|---|---|
| | 0.25 mpk LNP | | 1 mpk LNP | |
| | Average hFIX | StDev hFIX | Average hFIX | StDev hFIX |
| Week | (ug/mL) | (ug/mL) | (ug/mL) | (ug/mL) |
| 2 | 0.87 | 0.15 | 4.02 | 1.75 |
| 8 | 0.99 | 0.15 | 4.11 | 1.41 |
| 12 | 0.93 | 0.14 | 4.15 | 1.35 |
| 20 | 0.83 | 0.22 | 4.27 | 1.54 |
| 41 | 0.83 | 0.37 | 4.76 | 1.62 |
| 52 | 0.82 | 0.25 | 4.72 | 1.54 |

### Example 10—Effects of Varied Doses of AAV and LNP to Modulate hFIX Expression In Vivo

[0284] In this Example, the effects of varying the dose of both AAV and LNP to modulate expression of hFIX following targeted insertion into intron 1 of albumin was assessed in C57B1/6 mice.

[0285] The ssAAV and LNPs tested in this Example were prepared and delivered to mice as described in Example 1. The LNP formulation contained G000553 and the ssAAV was derived from P00147. The AAV was delivered at 1e11, 3e11, 1e12 or 3e12 vg/ms and the LNP was delivered at 0.1, 0.3, or 1.0 mg/kg (with respect to total RNA cargo content) (n=5 for each group). Two weeks post-dose, the animals were euthanized and sera were collected for hFIX expression analysis.

[0286] As shown in FIG. 12A (1 week) and FIG. 12B (2 weeks) and Table 23, varying the dose of either AAV or LNP can modulate the amount of expression of hFIX from intron 1 of albumin in vivo.

TABLE 23
Serum hFIX

| | RNP Dose | AAV Dose | Mean FIX | | |
|---|---|---|---|---|---|
| Timepoint | (mg/kg) | (MOI) | (ng/ml) | SD | N |
| Week 1 | 0.1 | 1E+11 | 0.08 | 0.02 | 2 |
| | | 3E+11 | 0.11 | 0.04 | 5 |
| | | 1E+12 | 0.41 | 0.15 | 5 |
| | | 3E+12 | 0.61 | 0.17 | 5 |
| | 0.3 | 1E+11 | 0.36 | 0.14 | 5 |
| | | 3E+11 | 0.67 | 0.26 | 5 |
| | | 1E+12 | 1.76 | 0.14 | 5 |
| | | 3E+12 | 4.70 | 2.40 | 5 |
| | 1.0 | 1E+11 | 3.71 | 0.31 | 4 |
| | | 3E+11 | 8.00 | 0.51 | 5 |
| | | 1E+12 | 14.17 | 1.38 | 5 |
| | | 3E+12 | 20.70 | 2.79 | 5 |
| | Human serum 1:1000 | | 6.62 | — | 1 |
| Week 2 | 0.1 | 1E+11 | 0.12 | 0.01 | 2 |
| | | 3E+11 | 0.26 | 0.07 | 5 |
| | | 1E+12 | 0.83 | 0.24 | 5 |
| | | 3E+12 | 1.48 | 0.35 | 5 |
| | 0.3 | 1E+11 | 0.70 | 0.26 | 4 |
| | | 3E+11 | 1.42 | 0.37 | 5 |
| | | 1E+12 | 3.53 | 0.49 | 5 |
| | | 3E+12 | 8.94 | 4.39 | 5 |
| | 1.0 | 1E+11 | 5.40 | 0.47 | 4 |
| | | 3E+11 | 12.31 | 2.45 | 5 |
| | | 1E+12 | 17.89 | 1.95 | 5 |
| | | 3E+12 | 25.52 | 3.62 | 5 |

| | | | |
|---|---|---|---|
| Human serum 1:1000 | 4.47 | — | 1 |

### Example 11—In Vitro Screening of Bidirectional Constructs Across Target Sites in Primary Cynomolgus and Primary Human Hepatocytes

[0287] In this Example, ssAAV vectors comprising a bidirectional construct were tested across a panel of target sites utilizing gRNAs targeting intron 1 of cynomolgus (“cyno”) and human albumin in primary cyno (PCH) and primary human hepatocytes (PHH), respectively.

[0288] The ssAAV and lipid packet delivery materials tested in this Example were prepared and delivered to PCH and PHH as described in Example 1. Following treatment, isolated genomic DNA and cell media was collected for editing and transgene expression analysis, respectively. Each of the vectors comprised a reporter that can be measured through luciferase-based fluorescence detection as described in Example 1 (derived from plasmid P00415), plotted in FIG. 13B and FIG. 14B as relative luciferase units (“RLU”). The RLU data shown in FIG. 13B and FIG. 14B graphically, are reproduced numerically in Table 3 and Table 4 below. For example, the AAV vectors contained the NanoLuc ORF (in addition to GFP). Schematics of the vectors tested are provided in FIG. 13B and FIG. 14B. The gRNAs tested are shown in each of the Figures using a shortened number for those listed in Table 1 and Table 3.

[0289] As shown in FIG. 13A for PCH and FIG. 14A for PHH, varied levels of editing were detected for each of the combinations tested (editing data for some combinations tested in the PCH experiment are not reported in FIG. 13A and Table 3 due to failure of certain primer pairs used for the amplicon based sequencing). The editing data shown in FIG. 13A and FIG. 14A graphically, are reproduced numerically in Table 3 and Table 4 below. However, as shown in FIG. 13B, FIG. 13C and FIG. 14B and FIG. 14C, a significant level of indel formation was not predictive for insertion or expression of the transgenes, indicating little correlation between editing and insertion/expression of the bidirectional constructs in PCH and PHH, respectively. As one measure, the R² value calculated in FIG. 13C is 0.13, and the R2 value of FIG. 14D is 0.22.

TABLE 3
Albumin intron 1 editing and transgene expression data
for sgRNAs delivered to primary cynomolgus hepatocytes

| | Avg % | Std Dev % | Avg | Std Dev |
|---|---|---|---|---|
| GUIDE ID | Edit | Edit | RLU | RLU |
| G009867 | 25.05 | 0.21 | 10650.67 | 1455.97 |
| G009866 | 18.7 | 3.96 | 75556.67 | 12182.98 |
| G009876 | 14.85 | 4.88 | 27463.33 | 10833.53 |
| G009875 | 12.85 | 2.33 | 51660.00 | 6362.36 |
| G009874 | 28.25 | 6.01 | 270433.30 | 133734.10 |
| G009873 | 42.65 | 5.59 | 178600.00 | 87607.25 |
| G009865 | 59.15 | 0.21 | 301666.70 | 18610.03 |
| G009872 | 48.15 | 3.46 | 320233.30 | 63517.43 |
| G009871 | 46.5 | 5.23 | 211966.70 | 65852.44 |
| G009864 | 33.2 | 8.34 | 210033.30 | 61201.33 |
| G009863 | 54.8 | 12.45 | 69853.33 | 15216.92 |
| G009862 | 44.6 | 7.21 | 508666.70 | 119876.30 |
| G009861 | 28.65 | 0.21 | 178666.70 | 15821.93 |
| G009860 | 33.2 | 7.07 | 571333.30 | 52728.87 |
| G009859 | 0.05 | 0.07 | 258333.30 | 79052.73 |
| G009858 | 14.65 | 1.77 | 402333.30 | 25579.94 |
| G009857 | 23 | 0.99 | 312333.30 | 73036.52 |
| G009856 | 14.8 | 0.99 | 95900.00 | 21128.42 |
| G009851 | 1.5 | 0.42 | 105766.70 | 27048.91 |
| G009868 | 12.15 | 2.47 | 43033.33 | 9141.85 |
| G009850 | 63.45 | 13.93 | 228200.00 | 101542.10 |
| G009849 | 57.55 | 8.27 | 225400.00 | 46001.30 |
| G009848 | 33 | 5.37 | 156333.30 | 20647.84 |
| G009847 | 66.75 | 7 | 100866.70 | 22159.72 |
| G009846 | 61.85 | 5.02 | 31766.67 | 10107.59 |
| G009845 | 54.4 | 7.5 | 43020.00 | 11582.23 |
| G009844 | 47.15 | 2.05 | 110466.70 | 32031.44 |

TABLE 4
Albumin intron 1 editing and transgene expression data
for sgRNAs delivered to primary human hepatocytes

| | Avg % | Std Dev % | Avg | Std Dev |
|---|---|---|---|---|
| GUIDE ID | Edit | Edit | RLU | RLU |
| G009844 | 19.07 | 2.07 | 268333.30 | 80432.17 |
| G009851 | 0.43 | 0.35 | 18033.33 | 2145.54 |
| G009852 | 47.20 | 3.96 | 18400.00 | 2251.67 |
| G009857 | 0.10 | 0.14 | 71100.00 | 14609.24 |
| G009858 | 8.63 | 9.16 | 32000.00 | 18366.55 |
| G009859 | 3.07 | 3.50 | 59500.00 | 16014.99 |
| G009860 | 18.80 | 4.90 | 190333.30 | 54307.76 |
| G009861 | 10.27 | 2.51 | 62233.33 | 9865.26 |
| G009866 | 13.60 | 13.55 | 96200.00 | 46573.81 |
| G009867 | 12.97 | 3.04 | 3916.67 | 1682.03 |
| G009868 | 0.63 | 0.32 | 10176.67 | 2037.80 |
| G009874 | 49.13 | 0.60 | 318000.00 | 114118.40 |
| G012747 | 3.83 | 0.23 | 51000.00 | 6161.17 |
| G012748 | 1.30 | 0.35 | 17433.33 | 2709.86 |
| G012749 | 9.77 | 1.50 | 75066.67 | 11809.04 |
| G012750 | 42.73 | 4.58 | 5346.67 | 2977.35 |
| G012751 | 7.77 | 1.16 | 32066.67 | 18537.62 |
| G012752 | 32.93 | 2.27 | 402000.00 | 83144.45 |
| G012753 | 21.20 | 2.95 | 71800.00 | 32055.73 |
| G012754 | 0.60 | 0.10 | 16933.33 | 4254.80 |
| G012755 | 1.10 | 0.10 | 13833.33 | 3685.56 |
| G012756 | 2.17 | 0.40 | 35600.00 | 6055.58 |
| G012757 | 1.07 | 0.25 | 13993.33 | 6745.08 |
| G012758 | 0.90 | 0.10 | 34900.00 | 15308.82 |
| G012759 | 2.60 | 0.35 | 30566.67 | 15287.36 |
| G012760 | 39.10 | 6.58 | 6596.67 | 2133.13 |
| G012761 | 36.17 | 2.43 | 467666.70 | 210965.20 |
| G012762 | 8.50 | 0.57 | 217000.00 | 13000.00 |
| G012763 | 47.07 | 3.07 | 142333.30 | 37581.02 |
| G012764 | 44.57 | 5.83 | 1423333.00 | 261023.60 |
| G012765 | 19.90 | 1.68 | 179666.70 | 57011.69 |
| G012766 | 8.50 | 0.28 | 243333.30 | 17473.79 |

[0290] Additionally, ssAAV vectors comprising a bidirectional construct were tested across a panel of target sites utilizing single guide RNAs targeting intron 1 of human albumin in primary human hepatocytes (PHH).

[0291] The ssAAV and LNP materials were prepared and delivered to PHH as described in Example 1. Following treatment, isolated genomic DNA and cell media was collected for editing and transgene expression analysis, respectively. Each of the vectors comprised a reporter that can be measured through luciferase-based fluorescence detection as described in Example 1 (derived from plasmid P00415), plotted in FIG. 14D and shown in Table 24 as relative luciferase units (“RLU”). For example, the AAV vectors contained the NanoLuc ORF (in addition to GFP). Schematics of the vectors tested are provided in FIG. 13B and FIG. 14B. The gRNAs tested are shown in FIG. 14D using a shortened number for those listed in Table 1, and Table 7

TABLE 24
Albumin intron 1 transgene expression data for sgRNAs
delivered to primary cynomolgus hepatocytes

| | Average Luciferase | St. Dev Luciferase |
|---|---|---|
| Guide | (RLU) | (RLU) |
| G009844 | 3,700,000 | 509,117 |
| G009852 | 281,000 | 69,296 |
| G009857 | 1,550,000 | 127,279 |
| G009858 | 551,000 | 108,894 |
| G009859 | 1,425,000 | 77,782 |
| G009860 | 2,240,000 | 183,848 |
| G009861 | 663,500 | 238,295 |
| G009866 | 274,000 | 11,314 |
| G009867 | 44,700 | 566 |
| G009874 | 2,865,000 | 431,335 |
| G012747 | 651,000 | 59,397 |
| G012749 | 867,000 | 93,338 |
| G012752 | 4,130,000 | 268,701 |
| G012753 | 1,145,000 | 162,635 |
| G012757 | 579,000 | 257,387 |
| G012760 | 129,000 | 36,770 |
| G012761 | 4,045,000 | 728,320 |
| G012762 | 2,220,000 | 127,279 |
| G012763 | 1,155,000 | 205,061 |
| G012764 | 11,900,000 | 1,555,635 |
| G012765 | 1,935,000 | 134,350 |
| G012766 | 2,050,000 | 169,706 |
| LNP | 8,430 | 212 |

### Example 12—In Vivo Testing of the Human Factor 9 Gene Insertion in Non-Human Primates

[0292] In this example, an 8 week study was performed to evaluate the human Factor 9 gene insertion and hFIX protein expression in cynomolgus monkeys through administration of adeno-associated virus (AAV) and/or lipid nanoparticles (LNP) with various guides. This study was conducted with LNP formulations and AAV formulations prepared as described above. Each LNP formulation contained Cas9 mRNA and guide RNA (gRNA) with an mRNA:gRNA ratio of 2:1 by weight. The ssAAV was derived from P00147.

[0293] Male cynomologus monkeys were treated in cohorts of n=3. Animals were dosed with AAV by slow bolus injection or infusion in the doses described in Table 5. Following AAV treatment, animals received buffer or LNP as described in Table 5 by slow bolus or infusion.

[0294] Two weeks post-dose, liver specimens were collected through single ultrasound-guided percutaneous biopsy. Each biopsy specimen was flash frozen in liquid nitrogen and stored at −86 to −60° C. Editing analysis of the liver specimens was performed by NGS Sequencing as previously described.

[0295] For Factor IX ELISA analysis, blood samples were collected from the animals on days 7, 14, 28, and 56 post-dose. Blood samples were collected and processed to plasma following blood draw and stored at −86 to −60° C. until analysis.

[0296] The total human Factor IX levels were determined from plasma samples by ELISA. Briefly, Reacti-Bind 96-well microplate (VWR Cat #PI15041) were coated with capture antibody (mouse mAB to human Factor IX antibody (HTI, Cat #AHIX-5041)) at a concentration of 1 μg/ml then blocked using 1×PBS with 5% Bovine Serum Albumin. Test samples or standards of purified human Factor IX protein (ERL, Cat #HFIX 1009, Lot #HFIX4840) diluted in Cynomolgus monkey plasma were next incubated in individual wells. The detection antibody (Sheep anti-human Factor 9 polyclonal antibody, Abcam, Cat #ab128048) was adsorbed at a concentration of 100 ng/ml. The secondary antibody (Donkey anti-Sheep IgG pAbs with HRP, Abcam, Cat #ab97125) was used at 100 ng/mL. TMB Substrate Reagent set (BD OptEIA Cat #555214) was used to develop the plate. Optical density was assessed spectrophotometrically at 450 nm on a microplate reader (Molecular Devices i3 system) and analyzed using SoftMax pro 6.4.

[0297] Indel formation was detected, confirming that editing occurred. The NGS data showed effective indel formation. Expression of hFIX from the albumin locus in NHPs was measured by ELISA and is depicted in Table 6 and FIG. 15. Plasma levels of hFIX reached levels previously described as therapeutically effective (George, et al., NEJM 377 (23), 2215-27, 2017).

[0298] As measured, circulating hFIX protein levels were sustained through the eight week study (see FIG. 15, showing day 7, 14, 28, and 56 average levels of ˜135, ˜140, ˜150, and ˜110 ng/mL, respectively), achieving protein levels ranging from ˜75 ng/ml to ˜250 ng/mL. Plasma hFIX levels were calculated using a specific activity of ˜8 fold higher for the R338L hyperfunctional hFIX variant (Simioni et al., NEJM 361 (17), 1671-75, 2009) (which reports a protein-specific activity of hFIX-R338L of 390±28 U per milligram, and a protein-specific activity for wild-type factor IX of 45±2.4 U per milligram). Calculating the functionally normalized Factor IX activity for the hyperfunctional Factor IX variant tested in this example, the experiment achieved stable levels of human Factor IX protein in the NHPs over the 8 week study that correspond to about 20-40% of wild type Factor IX activity (range spans 12-67% of wild type Factor IX activity).

TABLE 5
Editing in liver

| | | | F9-AAV | | LNP |
|---|---|---|---|---|---|
| | | F9-AAV | Volume | LNP | Volume |
| Animal ID | Guide ID | (vg/kg) | (mL/kg) | (mg/kg) | (mL/kg) |
| 4001 | G009860 | 3E+13 | 1 | 3 | 2 |
| 4002 | G009860 | 3E+13 | 1 | 3 | 2 |
| 4003 | G009860 | 3E+13 | 1 | 3 | 2 |
| 5001 | TSS | 3E+13 | 1 | 0 | 0 |
| 5002 | TSS | 3E+13 | 1 | 0 | 0 |
| 5003 | TSS | 3E+13 | 1 | 0 | 0 |
| 6001 | G009862 | 0 | 0 | 3 | 2 |
| 6002 | G009862 | 0 | 0 | 3 | 2 |
| 6003 | G009862 | 0 | 0 | 3 | 2 |

TABLE 6
hFIX expression

| | Day 7 | Day 14 | Day 28 | Day 56 |
|---|---|---|---|---|
| Animal | Factor IX | Factor IX | Factor IX | Factor IX |
| ID | (ng/mL) | (ng/mL) | (ng/mL) | (ng/mL) |
| 4001 | 122.84/+−2.85 | 94.93/+−0.56 | 105.65/+−1.94 | 97.31/+−1.49 |
| 4002 | 149.77/+−13.5 | 222.92/+−9.61 | 252.49/+−6.46 | 152.05/+−7.46 |
| 4003 | 134.06/+−6.17 | 107.04/+−6.46 | 95.30/+−3.18 | 74.23/+−3.53 |
| 5001 | ND | ND | ND | ND |
| 5002 | ND | ND | ND | ND |
| 5003 | ND | ND | ND | ND |
| 6001 | ND | ND | ND | ND |
| 6002 | ND | ND | ND | ND |
| 6003 | ND | ND | ND | ND |

### Example 13 In Vivo Testing of Factor 9 Insertion in Non-Human Primates

[0299] In this example, a study was performed to evaluate the Factor 9 gene insertion and hFIX protein expression in cynomolgus monkeys following administration of ssAAV derived from P00147 and/or CRISPR/Cas9 lipid nanoparticles (LNP) with various guides including G009860 and various LNP components.

[0300] Indel formation was measured by NGS, confirming that editing occurred. Total human Factor IX levels were determined from plasma samples by ELISA using a mouse mAB to human Factor IX antibody (HTI, Cat #AHIX-5041), sheep anti-human Factor 9 polyclonal antibody (Abcam, Cat #ab128048), and donkey anti-Sheep IgG pAbs with HRP (Abcam, Cat #ab97125), as described in Example 12. Human FIX protein levels >3 fold higher than those achieved in the experiment of Example 12 were obtained from the bidirectional template using alternative CRISPR/Cas9 LNP. In the study, ELISA assay results indicate that circulating hFIX protein levels at or above the normal range of human FIX levels (3-5 ug/mL; Amiral et al., Clin. Chem., 30 (9), 1512-16, 1984) were achieved using G009860 in the NHPs by at least the day 14 and 28 timepoints. Initial data indicate circulating human FIX protein levels of ˜3-4 μg/mL at day 14 after a single dose, with levels sustained through the first 28 days (˜3-5 μg/mL) of the study. The human FIX levels were measured at the conclusion of the study by the same method and data are presented in the Table 25.

TABLE 25
Serum human Factor IX protein levels -ELISA Method of Example 13

| | Day 7 | | Day 14 | | Day 28 | | Day 42 | | Day 56 | |
|---|---|---|---|---|---|---|---|---|---|---|
| | FIX | STD | FIX | STD | FIX | STD | FIX | STD | FIX | STD |
| | ng/mL | DEV | ng/mL | DEV | ng/mL | DEV | ng/mL | DEV | ng/mL | DEV |
| 3001 | 2532.8 | 145.6 | 2562.6 | 99.0 | 3011.7 | 62.7 | 2936.7 | 72.4 | 2748.5 | 86.0 |
| 3002 | 2211.4 | 95.8 | 2958.5 | 119.2 | 3350.2 | 98.4 | 3049.7 | 112.7 | 3036.7 | 90.6 |
| 3003 | 3195.1 | 475.6 | 4433.9 | 238.7 | 3367.2 | 157.7 | 3746.1 | 95.6 | 3925.0 | 157.4 |

[0301] Circulating albumin levels were measured by ELISA, indicating that baseline albumin levels are maintained at 28 days. Tested albumin levels in untreated animals varied ±˜15% in the study. In treated animals, circulating albumin levels changed minimally and did not drop out of the normal range, and the levels recovered to baseline within one month.

[0302] Circulating human FIX protein levels were also determined by a sandwich immunoassay with a greater dynamic range. Briefly, an MSD GOLD 96-well Streptavidin SECTOR Plate (Meso Scale Diagnostics, Cat. L15SA-1) was blocked with 1% ECL Blocking Agent (Sigma, GERPN2125). After tapping out the blocking solution, biotinylated capture antibody (Sino Biological, 11503-R044) was immobilized on the plate. Recombinant human FIX protein (Enzyme Research Laboratories, HFIX 1009) was used to prepare a calibration standard in 0.5% ECL Blocking Agent. Following a wash, calibration standards and plasma samples were added to the plate and incubated. Following a wash, a detection antibody (Haematologic Technologies, AHIX-5041) conjugated with a sulfo-tag label was added to the wells and incubated. After washing away any unbound detection antibody, Read Buffer T was applied to the wells. Without any additional incubation, the plate was imaged with an MSD Quick Plex SQ120 instrument and data was analyzed with Discovery Workbench 4.0 software package (Meso Scale Discovery). Concentrations are expressed as mean calculated concentrations in ug/m. For the samples, N=3 unless indicated with an asterisk, in which case N=2. Expression of hFIX from the albumin locus in the treated study group as measured by the MSD ELISA is depicted in Table 26.

TABLE 26
Serum human Factor IX protein levels

| | Mean Calc. Conc. (ug/mL) | | | | | |
|---|---|---|---|---|---|---|
| | 3001 | | 3002 | | 3003 | |
| | | Inter- | | Inter- | | Inter- |
| Time | | Assay | | Assay | | Assay |
| Point | Conc. | CV | Conc. | CV | Conc. | CV |
| Day 7 | 7.85 | 20% | 5.63 | 14% | 11.20 | 26% |
| Day 14 | 8.65 | 15% | 11.06 | 18% | 14.70 | 28% |
| Day 28 | 9.14 | 7% | 14.12 | 7% | 10.85 | 25% |
| Day 42 | 9.03 | 10% | 33.12* | 0% | 13.22 | 13% |
| Day 56 | 10.24 | 13% | 16.72 | 12% | 33.84* | 4% |

### Example 14 Off-Target Analysis of Albumin Human Guides

[0303] A biochemical method (See, e.g., Cameron et al., Nature Methods. 6, 600-606; 2017) was used to determine potential off-target genomic sites cleaved by Cas9 targeting albumin. In this experiment, 13 sgRNA targeting human albumin and two control guides with known off-target profiles were screened using isolated HEK293 genomic DNA. The number of potential off-target sites detected using a guide concentration of 16 nM in the biochemical assay were shown in Table 27. The assay identified potential off-target sites for the sgRNAs tested.

TABLE 27
Off-Target Analysis

| | | Guide Sequence | Off-Target |
|---|---|---|---|
| gRNA ID | Target | (SEQ ID NO:) | Site Count |
| G012753 | Albumin | GACUGAAACUUCACAGAAUA | 62 |
| | | (SEQ ID NO: 20) | |
| G012761 | Albumin | AGUGCAAUGGAUAGGUCUUU | 75 |
| | | (SEQ ID NO: 28) | |
| G012752 | Albumin | UGACUGAAACUUCACAGAAU | 223 |
| | | (SEQ ID NO: 19) | |
| G012764 | Albumin | CCUCACUCUUGUCUGGGCAA | 3985 |
| | | (SEQ ID NO: 31) | |
| G012763 | Albumin | UGGGCAAGGGAAGAAAAAAA | 5443 |
| | | (SEQ ID NO: 30) | |
| G009857 | Albumin | AUUUAUGAGAUCAACAGCAC | 131 |
| | | (SEQ ID NO: 5) | |
| G009859 | Albumin | UUAAAUAAAGCAUAGUGCAA | 91 |
| | | (SEQ ID NO: 7) | |
| G009860 | Albumin | UAAAGCAUAGUGCAAUGGAU | 133 |
| | | (SEQ ID NO: 8) | |
| G012762 | Albumin | UGAUUCCUACAGAAAAACUC | 68 |
| | | (SEQ ID NO: 29) | |
| G009844 | Albumin | GAGCAACCUCACUCUUGUCU | 107 |
| | | (SEQ ID NO: 2) | |
| G012765 | Albumin | ACCUCACUCUUGUCUGGGCA | 41 |
| | | (SEQ ID NO: 32) | |
| G012766 | Albumin | UGAGCAACCUCACUCUUGUC | 78 |
| | | (SEQ ID NO: 33) | |
| G009874 | Albumin | UAAUAAAAUUCAAACAUCCU | 53 |
| | | (SEQ ID NO: 13) | |
| G000644 | EMX1 | GAGUCCGAGCAGAAGAAGAA | 304 |
| | | (SEQ ID NO 1129) | |
| G000645 | VEGFA | GACCCCCUCCACCCCGCCUC | 1641 |
| | | (SEQ ID NO 1130) | |

[0304] In known off-target detection assays such as the biochemical method used above, a large number of potential off-target sites are typically recovered, by design, so as to “cast a wide net” for potential sites that can be validated in other contexts, e.g., in a primary cell of interest. For example, the biochemical method typically overrepresents the number of potential off-target sites as the assay utilizes purified high molecular weight genomic DNA free of the cell environment and is dependent on the dose of Cas9 RNP used. Accordingly, potential off-target sites identified by this method are validated using targeted sequencing of the identified potential off-target sites.

### Example 15 Construction of Constructs for the Expression of Secretory or Non Secretory Proteins

[0305] Constructs, such as bidirectional constructs, can be designed such that they express secretory or non secretory proteins. For the production of a secretory protein, a construct may comprise a signal sequence which aids in translocating the polypeptide to the ER lumen. Alternatively, a construct may utilize the endogenous signal sequence of the host cell (e.g., the endogenous albumin signal sequence when the transgene is integrated into a host cell's albumin locus).

[0306] In contrast, constructs for the expression of non secretory proteins may be designed such that they do not comprise a signal sequence and such that they do not utilize the endogenous signal sequence of the host cell. Some methods by which this may be achieved include the incorporation of an Internal ribosome entry site (IRES) sequence in the construct. IRES sequences, such as EMCV IRES, allow for the initiation of translation from any position within an mRNA immediately downstream from where the IRES is located. This would allow for the expression of a protein which lacks the endogenous signal sequence of the host cell from an insertion site that contains a signal sequence upstream (e.g. the signal sequence found in Exon 1 of albumin locus would not be included in the expressed protein). In the absence of a signal sequence, the protein would not be secreted. Examples of IRES sequences that can be used in a construct, include those from picornaviruses (e.g., FMDV), pest viruses (CFFV), polio viruses (PV), encephalomyocarditis viruses (ECMV), foot-and-mouth disease viruses (FMDV), hepatitis C viruses (HCV), classical swine fever viruses (CSFV), murine leukemia virus (MLV), simian immune deficiency viruses (SIV) or cricket paralysis viruses (CrPV).

[0307] An alternative approach for expressing non secretory proteins is to include one or more self-cleaving peptides upstream of the polypeptide of interest in the construct. A self cleaving peptide, such as 2A or 2A-like sequences, serve as ribosome skipping signals to produce multiple individual proteins from a single mRNA transcript. As shown in Plasmid ID P00415 from Table 11, a self cleaving peptide (e.g. P2A) can be used to generate a bicistronic vector which expresses two transgenes (e.g., nanoluciferase and GFP). Alternatively, a self cleaving peptide can be used to express a protein which lacks the endogenous signal sequence of the host cell (e.g. the 2A sequence located upstream of the protein of interest would result in cleavage between the endogenous albumin signal sequence and the protein of interest). Representative 2A peptides which could be utilized are shown in Table 28. Additionally, (GSG) residues may be added to the 5′ end of the peptide to improve cleavage efficiency as shown in Table 12.

TABLE 28
Self cleaving peptides for use in constructs

| Peptide | Amino Acid Sequence |
|---|---|
| T2A (SEQ ID NO: 1131) | EGRGSLLTCGDVEENPGP |
| P2A (SEQ ID NO: 1132) | ATNFSLLKQAGDVEENPGP |
| E2A (SEQ ID NO: 1133) | QCTNYALLKLAGDVESNPGP |
| F2A (SEQ ID NO: 1134) | VKQTLNFDLLKLAGDVESNPGP |
| T2A with GSG residues | GSGEGRGSLLTCGDVEENPGP |
| (SEQ ID NO: 1135) | |
| P2A with GSG residues | GSGATNFSLLKQAGDVEENPGP |
| (SEQ ID NO: 1136) | |
| E2A with GSG residues | GSGQCTNYALLKLAGDVESNPGP |
| (SEQ ID NO: 1137) | |
| F2A with GSG residues | GSGVKQTLNFDLLKLAGDVESNPGP |
| (SEQ ID NO: 1138) | |

### Example 16. Use of Humanized Albumin Mice to Screen Guide RNAs for Human F9 Insertion In Vivo

[0308] We aimed to identify effective guide RNAs for hF9 insertion into the human albumin locus. To this end, we utilized mice in which the mouse albumin locus was replaced with the corresponding human albumin genomic sequence, including the first intron (ALB^{hu/hu} mice). This allowed us to test the insertion efficiency of guide RNAs targeting the first intron of human albumin in the context of an adult liver in vivo. Two separate mouse experiments were set up using the ALB^{hu/hu} mice to screen a total of 11 guide RNAs, each targeting the first intron of the human albumin locus. All mice were weighed and injected via tail vein at day 0 of the experiment. Blood was collected at weeks 1, 3, 4, and 6 via tail bleed, and plasma was separated. Mice were terminated at week 7. Blood was collected via the vena cava, and plasma was separated. Livers and spleens were dissected as well.

[0309] In the first experiment, 6 LNPs comprising Cas9 mRNA and the following guides were prepared as in Example 1 and tested: G009852, G009859, G009860, G009864, G009874, and G012764. LNPs were diluted to 0.3 mg/kg (using an average weight of 30 grams) and co-injected with AAV8 packaged with the bi-directional hF9 insertion template at a dose of 3E11 viral genomes per mouse. Five ALB^{hu/hu} male mice between 12 and 14 weeks old were injected per group. Five mice from same cohort were injected with AAV8 packaged with a CAGG promoter operably linked to hF9, which leads to episomal expression of hF9 (at 3E11 viral genomes per mouse). There were three negative control groups with three mice per group that were injected with buffer alone, AAV8 packaged with the bi-directional hF9 insertion template alone, or LNP-G009874 alone.

[0310] In the experiment, the following LNPs comprising Cas9 mRNA and the following guides were prepared as in Example 1 and tested: G009860, G012764, G009844, G009857, G012752, G012753, and G012761. All were diluted to 0.3 mg/kg (using an average weight of 40 grams) and co-injected with AAV8 packaged with the bi-directional hF9 insertion template at a dose of 3E11 viral genomes per mouse. Five ALB^{hu/hu} male mice 30 weeks old were injected per group. Five mice from same cohort were injected with AAV8 packaged with a CAGG promoter operably linked to hF9, which leads to episomal expression of hF9 (at 3E11 viral genomes per mouse). There were three negative control groups with three mice per group that were injected with buffer alone, AAV8 packaged with the bi-directional hF9 insertion template alone, or LNP-G009874 alone.

[0311] For analysis, an ELISA was performed to measure levels of hFIX circulating in the mice at each timepoint. Human Factor IX ELISA Kits (ab188393) were used for this purpose, and all plates were run with human pooled normal plasma from George King Bio-Medical as a positive assay control. Human Factor IX expression levels in the plasma samples in each group at week 6 post-injection are shown in FIG. 16A and FIG. 16B. Consistent with the in vitro insertion data, low to no Factor IX serum levels were detected when guide RNA G009852 was used. Consistent with the lack of an adjacent PAM sequence in human albumin, Factor IX serum levels were not detectable when guide RNA G009864 was used. Factor IX expression in the serum was observed for the groups using guide RNAs G009859, G009860, G009874, and G0012764.

[0312] Spleens and a portion of the left lateral lobe of all livers were submitted for next-generation sequencing (NGS) analysis. NGS was used to assess the percentage of liver cells with insertions/deletions (indels) at the humanized albumin locus at week 7 post-injection with AAV-hF9 donor and LNP-CRISPR/Cas9. Consistent with the lack of an adjacent PAM sequence in human albumin, no editing was detectable in the liver when guide RNA G009864 was used. Editing in the liver was observed for the groups using guide RNAs G009859, G009860, G009874, and G012764 (data not shown).

[0313] 20) The remaining liver was fixed for 24 hours in 10% neutral buffered formalin and then transferred to 70% ethanol. Four to five samples from separate lobes were cut and shipped to HistoWisz and were processed and embedded in paraffin blocks. Five-micron sections were then cut from each paraffin block, and BASESCOPE™ was performed on the Ventana Ultra Discovery (Roche) using the universal BASESCOPE™ procedure and reagents by Advanced Cell Diagnostics and a custom designed probe that targets the unique mRNA junction formed between the human albumin signal sequence from the first intron of the ALB^{hu/hu} albumin locus and the hF9 transgene when successful integration and transcription is achieved. HALO imaging software (Indica Labs) was then used to quantify the percentage of positive cells in each sample. The average of percentage positive cells across the multiple lobes for each animal was then correlated to the hFIX levels in the serum at week 7. The results are shown in FIG. 17 and Table 29. The week 7 serum levels and the % positive cells for the hALB-hFIX mRNA strongly correlated (r=0.89; R²=0.79).

TABLE 29
Week 7 hFIX and BASESCOPE ™ Data.

| | | hFIX | % mRNA | STD | Total |
|---|---|---|---|---|---|
| | | ug/mL | Probe (4-5 | % mRNA | Cells |
| Mouse | Guide | (Week 7) | Sections) | Probe | Counted |
| 1 | Buffer | ND | 0.09 | 0.03 | 152833 |
| 4 | AAV Only | ND | 0.53 | 0.67 | 351084 |
| 7 | LNP Only | ND | 0.48 | 0.33 | 75160 |
| 10 | CAG F9 | 211.8 | 0.20 | 0.22 | 190277 |
| 15 | G009852 | ND | 0.30 | 0.09 | 144518 |
| 20 | G009859 | 0.5 | 0.82 | 0.45 | 143817 |
| 21 | G009859 | 0.5 | 0.88 | 0.43 | 160172 |
| 22 | G009859 | 2.3 | 1.71 | 1.54 | 26015 |
| 23 | G009859 | 3.8 | 2.74 | 0.59 | 183085 |
| 24 | G009859 | 0.6 | 2.78 | 1.96 | 152424 |
| 25 | G009860 | 5.6 | 12.46 | 5.80 | 78935 |
| 26 | G009860 | 10.6 | 13.76 | 5.32 | 112252 |
| 27 | G009860 | 9.7 | 14.80 | 5.45 | 201592 |
| 28 | G009860 | 2.1 | 3.32 | 0.76 | 84710 |
| 29 | G009860 | 3.0 | 1.52 | 0.35 | 203277 |
| 30 | G009864 | ND | 1.94 | 1.78 | 145807 |
| 35 | G009874 | 1.7 | 2.42 | 1.14 | 126665 |
| 36 | G009874 | 1.5 | 1.08 | 0.53 | 195861 |
| 37 | G009874 | 2.1 | 1.02 | 1.29 | 181679 |
| 38 | G009874 | 5.5 | 0.40 | 0.43 | 175359 |
| 39 | G009874 | 1.5 | 0.44 | 0.18 | 205417 |
| 40 | G012764 | 15.7 | 28.85 | 7.11 | 167824 |
| 41 | G012764 | 19.6 | 19.17 | 8.23 | 70081 |
| 42 | G012764 | 1.9 | 1.95 | 1.79 | 154742 |
| 43 | G012764 | 7.7 | 4.38 | 0.68 | 114060 |
| 44 | G012764 | 3.0 | 1.64 | 1.04 | 238623 |
| 43 | DapB (−) | — | 0.12 | 0.07 | 144730 |

Human albumin intron 1:
(SEQ ID NO: 1)
GTAAGAAATCCATTTTTCTATTGTTCAACTTTTATTCTATTTTCCCAGTA
AAATAAAGTTTTAGTAAACTCTGCATCTTTAAAGAATTATTTTGGCATTT
ATTTCTAAAATGGCATAGTATTTTGTATTTGTGAAGTCTTACAAGGTTAT
CTTATTAATAAAATTCAAACATCCTAGGTAAAAAAAAAAAAAGGTCAGAA
TTGTTTAGTGACTGTAATTTTCTTTTGCGCACTAAGGAAAGTGCAAAGTA
ACTTAGAGTGACTGAAACTTCACAGAATAGGGTTGAAGATTGAATTCATA
ACTATCCCAAAGACCTATCCATTGCACTATGCTTTATTTAAAAACCACAA
AACCTGTGCTGTTGATCTCATAAATAGAACTTGTATTTATATTTATTTTC
ATTTTAGTCTGTCTTCTTGGTTGCTGTTGATAGACACTAAAAGAGTATTA
GATATTATCTAAGTTTGAATATAAGGCTATAAATATTTAATAATTTTTAA
AATAGTATTCTTGGTAATTGAATTATTCTTCTGTTTAAAGGCAGAAGAAA
TAATTGAACATCATCCTGAGTTTTTCTGTAGGAATCAGAGCCCAATATTT
TGAAACAAATGCATAATCTAAGTCAAATGGAAAGAAATATAAAAAGTAAC
ATTATTACTTCTTGTTTTCTTCAGTATTTAACAATCCTTTTTTTTCTTCC
CTTGCCCAG

TABLE 7
Mouse albumin guide RNA

| | | | SEQ |
|---|---|---|---|
| | | | ID |
| Guide ID | Guide Sequence | Genomic Coordinates | NO: |
| G000551 | AUUUGCAUCUGAGAACCCUU | chr5: 90461148-90461168 | 98 |
| G000552 | AUCGGGAACUGGCAUCUUCA | chr5: 90461590-90461610 | 99 |
| G000553 | GUUACAGGAAAAUCUGAAGG | chr5: 90461569-90461589 | 100 |
| G000554 | GAUCGGGAACUGGCAUCUUC | chr5: 90461589-90461609 | 101 |
| G000555 | UGCAUCUGAGAACCCUUAGG | chr5: 90461151-90461171 | 102 |
| G000666 | CACUCUUGUCUGUGGAAACA | chr5: 90461709-90461729 | 103 |
| G000667 | AUCGUUACAGGAAAAUCUGA | chr5: 90461572-90461592 | 104 |
| G000668 | GCAUCUUCAGGGAGUAGCUU | chr5: 90461601-90461621 | 105 |
| G000669 | CAAUCUUUAAAUAUGUUGUG | chr5: 90461674-90461694 | 106 |
| G000670 | UCACUCUUGUCUGUGGAAAC | chr5: 90461710-90461730 | 107 |
| G011722 | UGCUUGUAUUUUUCUAGUAA | chr5: 90461039-90461059 | 108 |
| G011723 | GUAAAUAUCUACUAAGACAA | chr5: 90461425-90461445 | 109 |
| G011724 | UUUUUCUAGUAAUGGAAGCC | chr5: 90461047-90461067 | 110 |
| G011725 | UUAUAUUAUUGAUAUAUUUU | chr5: 90461174-90461194 | 111 |
| G011726 | GCACAGAUAUAAACACUUAA | chr5: 90461480-90461500 | 112 |
| G011727 | CACAGAUAUAAACACUUAAC | chr5: 90461481-90461501 | 113 |
| G011728 | GGUUUUAAAAAUAAUAAUGU | chr5: 90461502-90461522 | 114 |
| G011729 | UCAGAUUUUCCUGUAACGAU | chr5: 90461572-90461592 | 115 |
| G011730 | CAGAUUUUCCUGUAACGAUC | chr5: 90461573-90461593 | 116 |
| G011731 | CAAUGGUAAAUAAGAAAUAA | chr5: 90461408-90461428 | 117 |
| G013018 | GGAAAAUCUGAAGGUGGCAA | chr5: 90461563-90461583 | 118 |
| G013019 | GGCGAUCUCACUCUUGUCUG | chr5: 90461717-90461737 | 119 |

TABLE 8
Mouse albumin sgRNAs and modification pattern

| | | SEQ | | SEQ |
|---|---|---|---|---|
| | | ID | | ID |
| Guide ID | Full Sequence | NO: | Full Sequence Modified | NO: |
| G000551 | AUUUGCAUCUGAGAACCCUUGU | 120 | mA*mU*mU*UGCAUCUGAGAACC | 142 |
| | UUUAGAGCUAGAAAUAGCAAGU | | CUUGUUUUAGAmGmCmUmAmGm | |
| | UAAAAUAAGGCUAGUCCGUUAU | | AmAmAmUmAmGmCAAGUUAAAA | |
| | CAACUUGAAAAAGUGGCACCGA | | UAAGGCUAGUCCGUUAUCAmAmC | |
| | GUCGGUGCUUUU | | mUmUmGmAmAmAmAmAmGmUm | |
| | | | GmGmCmAmCmCmGmAmGmUmCm | |
| | | | GmGmUmGmCmU*mU*mU*mU | |
| G000552 | AUCGGGAACUGGCAUCUUCA | 121 | mA*mU*mC*GGGAACUGGCAUCU | 143 |
| | GUUUUAGAGCUAGAAAUAGC | | UCAGUUUUAGAmGmCmUmAmGm | |
| | AAGUUAAAAUAAGGCUAGUC | | AmAmAmUmAmGmCAAGUUAAAA | |
| | CGUUAUCAACUUGAAAAAGU | | UAAGGCUAGUCCGUUAUCAmAmC | |
| | GGCACCGAGUCGGUGCUUUU | | mUmUmGmAmAmAmAmAmGmUm | |
| | | | GmGmCmAmCmCmGmAmGmUmCm | |
| | | | GmGmUmGmCmU*mU*mU*mU | |
| G000553 | GUUACAGGAAAAUCUGAAGG | 122 | mG*mU*mU*ACAGGAAAAUCUGA | 144 |
| | GUUUUAGAGCUAGAAAUAGC | | AGGGUUUUAGAmGmCmUmAmGm | |
| | AAGUUAAAAUAAGGCUAGUC | | AmAmAmUmAmGmCAAGUUAAAA | |
| | CGUUAUCAACUUGAAAAAGU | | UAAGGCUAGUCCGUUAUCAmAmC | |
| | GGCACCGAGUCGGUGCUUUU | | mUmUmGmAmAmAmAmAmGmUm | |
| | | | GmGmCmAmCmCmGmAmGmUmCm | |
| | | | GmGmUmGmCmU*mU*mU*mU | |
| G000554 | GAUCGGGAACUGGCAUCUUC | 123 | mG*mA*mU*CGGGAACUGGCAUC | 145 |
| | GUUUUAGAGCUAGAAAUAGC | | UUCGUUUUAGAmGmCmUmAmGm | |
| | AAGUUAAAAUAAGGCUAGUC | | AmAmAmUmAmGmCAAGUUAAAA | |
| | CGUUAUCAACUUGAAAAAGU | | UAAGGCUAGUCCGUUAUCAmAmC | |
| | GGCACCGAGUCGGUGCUUUU | | mUmUmGmAmAmAmAmAmGmUm | |
| | | | GmGmCmAmCmCmGmAmGmUmCm | |
| | | | GmGmUmGmCmU*mU*mU*mU | |
| G000555 | UGCAUCUGAGAACCCUUAGG | 124 | mU*mG*mC*AUCUGAGAACCCUU | 146 |
| | GUUUUAGAGCUAGAAAUAGC | | AGGGUUUUAGAmGmCmUmAmGm | |
| | AAGUUAAAAUAAGGCUAGUC | | AmAmAmUmAmGmCAAGUUAAAA | |
| | CGUUAUCAACUUGAAAAAGU | | UAAGGCUAGUCCGUUAUCAmAmC | |
| | GGCACCGAGUCGGUGCUUUU | | mUmUmGmAmAmAmAmAmGmUm | |
| | | | GmGmCmAmCmCmGmAmGmUmCm | |
| | | | GmGmUmGmCmU*mU*mU*mU | |
| G000666 | CACUCUUGUCUGUGGAAACA | 125 | mC*mA*mC*UCUUGUCUGUGGAA | 147 |
| | GUUUUAGAGCUAGAAAUAGC | | ACAGUUUUAGAmGmCmUmAmGm | |
| | AAGUUAAAAUAAGGCUAGUC | | AmAmAmUmAmGmCAAGUUAAAA | |
| | CGUUAUCAACUUGAAAAAGU | | UAAGGCUAGUCCGUUAUCAmAmC | |
| | GGCACCGAGUCGGUGCUUUU | | mUmUmGmAmAmAmAmAmGmUm | |
| | | | GmGmCmAmCmCmGmAmGmUmCm | |
| | | | GmGmUmGmCmU*mU*mU*mU | |
| G000667 | AUCGUUACAGGAAAAUCUGA | 126 | mA*mU*mC*GUUACAGGAAAAUC | 148 |
| | GUUUUAGAGCUAGAAAUAGC | | UGAGUUUUAGAmGmCmUmAmGm | |
| | AAGUUAAAAUAAGGCUAGUC | | AmAmAmUmAmGmCAAGUUAAAA | |
| | CGUUAUCAACUUGAAAAAGU | | UAAGGCUAGUCCGUUAUCAmAmC | |
| | GGCACCGAGUCGGUGCUUUU | | mUmUmGmAmAmAmAmAmGmUm | |
| | | | GmGmCmAmCmCmGmAmGmUmCm | |
| | | | GmGmUmGmCmU*mU*mU*mU | |
| G000668 | GCAUCUUCAGGGAGUAGCUU | 127 | mG*mC*mA*UCUUCAGGGAGUAG | 149 |
| | GUUUUAGAGCUAGAAAUAGC | | CUUGUUUUAGAmGmCmUmAmGm | |
| | AAGUUAAAAUAAGGCUAGUC | | AmAmAmUmAmGmCAAGUUAAAA | |
| | CGUUAUCAACUUGAAAAAGU | | UAAGGCUAGUCCGUUAUCAmAmC | |
| | GGCACCGAGUCGGUGCUUUU | | mUmUmGmAmAmAmAmAmGmUm | |
| | | | GmGmCmAmCmCmGmAmGmUmCm | |
| | | | GmGmUmGmCmU*mU*mU*mU | |
| G000669 | CAAUCUUUAAAUAUGUUGUG | 128 | mC*mA*mA*UCUUUAAAUAUGUU | 150 |
| | GUUUUAGAGCUAGAAAUAGC | | GUGGUUUUAGAmGmCmUmAmGm | |
| | AAGUUAAAAUAAGGCUAGUC | | AmAmAmUmAmGmCAAGUUAAAA | |
| | CGUUAUCAACUUGAAAAAGU | | UAAGGCUAGUCCGUUAUCAmAmC | |
| | GGCACCGAGUCGGUGCUUUU | | mUmUmGmAmAmAmAmAmGmUm | |
| | | | GmGmCmAmCmCmGmAmGmUmCm | |
| | | | GmGmUmGmCmU*mU*mU*mU | |
| G000670 | UCACUCUUGUCUGUGGAAAC | 129 | mU*mC*mA*CUCUUGUCUGUGGA | 151 |
| | GUUUUAGAGCUAGAAAUAGC | | AACGUUUUAGAmGmCmUmAmGm | |
| | AAGUUAAAAUAAGGCUAGUC | | AmAmAmUmAmGmCAAGUUAAAA | |
| | CGUUAUCAACUUGAAAAAGU | | UAAGGCUAGUCCGUUAUCAmAmC | |
| | GGCACCGAGUCGGUGCUUUU | | mUmUmGmAmAmAmAmAmGmUm | |
| | | | GmGmCmAmCmCmGmAmGmUmCm | |
| | | | GmGmUmGmCmU*mU*mU*mU | |
| G011722 | UGCUUGUAUUUUUCUAGUAA | 130 | mU*mG*mC*UUGUAUUUUUCUAG | 152 |
| | GUUUUAGAGCUAGAAAUAGC | | UAAGUUUUAGAmGmCmUmAmGm | |
| | AAGUUAAAAUAAGGCUAGUC | | AmAmAmUmAmGmCAAGUUAAAA | |
| | CGUUAUCAACUUGAAAAAGU | | UAAGGCUAGUCCGUUAUCAmAmC | |
| | GGCACCGAGUCGGUGCUUUU | | mUmUmGmAmAmAmAmAmGmUm | |
| | | | GmGmCmAmCmCmGmAmGmUmCm | |
| | | | GmGmUmGmCmU*mU*mU*mU | |
| G011723 | GUAAAUAUCUACUAAGACAA | 131 | mG*mU*mA*AAUAUCUACUAAGA | 153 |
| | GUUUUAGAGCUAGAAAUAGC | | CAAGUUUUAGAmGmCmUmAmGm | |
| | AAGUUAAAAUAAGGCUAGUC | | AmAmAmUmAmGmCAAGUUAAAA | |
| | CGUUAUCAACUUGAAAAAGU | | UAAGGCUAGUCCGUUAUCAmAmC | |
| | GGCACCGAGUCGGUGCUUUU | | mUmUmGmAmAmAmAmAmGmUm | |
| | | | GmGmCmAmCmCmGmAmGmUmCm | |
| | | | GmGmUmGmCmU*mU*mU*mU | |
| G011724 | UUUUUCUAGUAAUGGAAGCC | 132 | mU*mU*mU*UUCUAGUAAUGGAA | 154 |
| | GUUUUAGAGCUAGAAAUAGC | | GCCGUUUUAGAmGmCmUmAmGm | |
| | AAGUUAAAAUAAGGCUAGUC | | AmAmAmUmAmGmCAAGUUAAAA | |
| | CGUUAUCAACUUGAAAAAGU | | UAAGGCUAGUCCGUUAUCAmAmC | |
| | GGCACCGAGUCGGUGCUUUU | | mUmUmGmAmAmAmAmAmGmUm | |
| | | | GmGmCmAmCmCmGmAmGmUmCm | |
| | | | GmGmUmGmCmU*mU*mU*mU | |
| G011725 | UUAUAUUAUUGAUAUAUUUU | 133 | mU*mU*mA*UAUUAUUGAUAUAU | 155 |
| | GUUUUAGAGCUAGAAAUAGC | | UUUGUUUUAGAmGmCmUmAmGm | |
| | AAGUUAAAAUAAGGCUAGUC | | AmAmAmUmAmGmCAAGUUAAAA | |
| | CGUUAUCAACUUGAAAAAGU | | UAAGGCUAGUCCGUUAUCAmAmC | |
| | GGCACCGAGUCGGUGCUUUU | | mUmUmGmAmAmAmAmAmGmUm | |
| | | | GmGmCmAmCmCmGmAmGmUmCm | |
| | | | GmGmUmGmCmU*mU*mU*mU | |
| G011726 | GCACAGAUAUAAACACUUAA | 134 | mG*mC*mA*CAGAUAUAAACACU | 156 |
| | GUUUUAGAGCUAGAAAUAGC | | UAAGUUUUAGAmGmCmUmAmGm | |
| | AAGUUAAAAUAAGGCUAGUC | | AmAmAmUmAmGmCAAGUUAAAA | |
| | CGUUAUCAACUUGAAAAAGU | | UAAGGCUAGUCCGUUAUCAmAmC | |
| | GGCACCGAGUCGGUGCUUUU | | mUmUmGmAmAmAmAmAmGmUm | |
| | | | GmGmCmAmCmCmGmAmGmUmCm | |
| | | | GmGmUmGmCmU*mU*mU*mU | |
| G011727 | CACAGAUAUAAACACUUAAC | 135 | mC*mA*mC*AGAUAUAAACACUU | 157 |
| | GUUUUAGAGCUAGAAAUAGC | | AACGUUUUAGAmGmCmUmAmGm | |
| | AAGUUAAAAUAAGGCUAGUC | | AmAmAmUmAmGmCAAGUUAAAA | |
| | CGUUAUCAACUUGAAAAAGU | | UAAGGCUAGUCCGUUAUCAmAmC | |
| | GGCACCGAGUCGGUGCUUUU | | mUmUmGmAmAmAmAmAmGmUm | |
| | | | GmGmCmAmCmCmGmAmGmUmCm | |
| | | | GmGmUmGmCmU*mU*mU*mU | |
| G011728 | GGUUUUAAAAAUAAUAAUGU | 136 | mG*mG*mU*UUUAAAAAUAAUAA | 158 |
| | GUUUUAGAGCUAGAAAUAGC | | UGUGUUUUAGAmGmCmUmAmGm | |
| | AAGUUAAAAUAAGGCUAGUC | | AmAmAmUmAmGmCAAGUUAAAA | |
| | CGUUAUCAACUUGAAAAAGU | | UAAGGCUAGUCCGUUAUCAmAmC | |
| | GGCACCGAGUCGGUGCUUUU | | mUmUmGmAmAmAmAmAmGmUm | |
| | | | GmGmCmAmCmCmGmAmGmUmCm | |
| | | | GmGmUmGmCmU*mU*mU*mU | |
| G011729 | UCAGAUUUUCCUGUAACGAU | 137 | mU*mC*mA*GAUUUUCCUGUAAC | 159 |
| | GUUUUAGAGCUAGAAAUAGC | | GAUGUUUUAGAmGmCmUmAmGm | |
| | AAGUUAAAAUAAGGCUAGUC | | AmAmAmUmAmGmCAAGUUAAAA | |
| | CGUUAUCAACUUGAAAAAGU | | UAAGGCUAGUCCGUUAUCAmAmC | |
| | GGCACCGAGUCGGUGCUUUU | | mUmUmGmAmAmAmAmAmGmUm | |
| | | | GmGmCmAmCmCmGmAmGmUmCm | |
| | | | GmGmUmGmCmU*mU*mU*mU | |
| G011730 | CAGAUUUUCCUGUAACGAUC | 138 | mC*mA*mG*AUUUUCCUGUAACG | 160 |
| | GUUUUAGAGCUAGAAAUAGC | | AUCGUUUUAGAmGmCmUmAmGm | |
| | AAGUUAAAAUAAGGCUAGUC | | AmAmAmUmAmGmCAAGUUAAAA | |
| | CGUUAUCAACUUGAAAAAGU | | UAAGGCUAGUCCGUUAUCAmAmC | |
| | GGCACCGAGUCGGUGCUUUU | | mUmUmGmAmAmAmAmAmGmUm | |
| | | | GmGmCmAmCmCmGmAmGmUmCm | |
| | | | GmGmUmGmCmU*mU*mU*mU | |
| G011731 | CAAUGGUAAAUAAGAAAUAA | 139 | mC*mA*mA*UGGUAAAUAAGAAA | 161 |
| | GUUUUAGAGCUAGAAAUAGC | | UAAGUUUUAGAmGmCmUmAmGm | |
| | AAGUUAAAAUAAGGCUAGUC | | AmAmAmUmAmGmCAAGUUAAAA | |
| | CGUUAUCAACUUGAAAAAGU | | UAAGGCUAGUCCGUUAUCAmAmC | |
| | GGCACCGAGUCGGUGCUUUU | | mUmUmGmAmAmAmAmAmGmUm | |
| | | | GmGmCmAmCmCmGmAmGmUmCm | |
| | | | GmGmUmGmCmU*mU*mU*mU | |
| G013018 | GGAAAAUCUGAAGGUGGCAA | 140 | mG*mG*mA*AAAUCUGAAGGUGG | 162 |
| | GUUUUAGAGCUAGAAAUAGC | | CAAGUUUUAGAmGmCmUmAmGm | |
| | AAGUUAAAAUAAGGCUAGUC | | AmAmAmUmAmGmCAAGUUAAAA | |
| | CGUUAUCAACUUGAAAAAGU | | UAAGGCUAGUCCGUUAUCAmAmC | |
| | GGCACCGAGUCGGUGCUUUU | | mUmUmGmAmAmAmAmAmGmUm | |
| | | | GmGmCmAmCmCmGmAmGmUmCm | |
| | | | GmGmUmGmCmU*mU*mU*mU | |
| G013019 | GGCGAUCUCACUCUUGUCUG | 141 | mG*mG*mC*GAUCUCACUCUUGU | 163 |
| | GUUUUAGAGCUAGAAAUAGC | | CUGGUUUUAGAmGmCmUmAmGm | |
| | AAGUUAAAAUAAGGCUAGUC | | AmAmAmUmAmGmCAAGUUAAAA | |
| | CGUUAUCAACUUGAAAAAGU | | UAAGGCUAGUCCGUUAUCAmAmC | |
| | GGCACCGAGUCGGUGCUUUU | | mUmUmGmAmAmAmAmAmGmUm | |
| | | | GmGmCmAmCmCmGmAmGmUmCm | |
| | | | GmGmUmGmCmU*mU*mU*mU | |

TABLE 9
Cyno albumin guide RNA

| Guide ID | Guide Sequence | Genomic Coordinates | SEQ ID NO: |
|---|---|---|---|
| G009844 | GAGCAACCUCACUCUUGUCU | chr5: 61198711-61198731 | 164 |
| G009845 | AGCAACCUCACUCUUGUCUG | chr5: 61198712-61198732 | 165 |
| G009846 | ACCUCACUCUUGUCUGGGGA | chr5: 61198716-61198736 | 166 |
| G009847 | CCUCACUCUUGUCUGGGGAA | chr5: 61198717-61198737 | 167 |
| G009848 | CUCACUCUUGUCUGGGGAAG | chr5: 61198718-61198738 | 168 |
| G009849 | GGGGAAGGGGAGAAAAAAAA | chr5: 61198731-61198751 | 169 |
| G009850 | GGGAAGGGGAGAAAAAAAAA | chr5: 61198732-61198752 | 170 |
| G009851 | AUGCAUUUGUUUCAAAAUAU | chr5: 61198825-61198845 | 171 |
| G009852 | UGCAUUUGUUUCAAAAUAUU | chr5: 61198826-61198846 | 172 |
| G009853 | UGAUUCCUACAGAAAAAGUC | chr5: 61198852-61198872 | 173 |
| G009854 | UACAGAAAAAGUCAGGAUAA | chr5: 61198859-61198879 | 174 |
| G009855 | UUUCUUCUGCCUUUAAACAG | chr5: 61198889-61198909 | 175 |
| G009856 | UUAUAGUUUUAUAUUCAAAC | chr5: 61198957-61198977 | 176 |
| G009857 | AUUUAUGAGAUCAACAGCAC | chr5: 61199062-61199082 | 177 |
| G009858 | GAUCAACAGCACAGGUUUUG | chr5: 61199070-61199090 | 178 |
| G009859 | UUAAAUAAAGCAUAGUGCAA | chr5: 61199096-61199116 | 179 |
| G009860 | UAAAGCAUAGUGCAAUGGAU | chr5: 61199101-61199121 | 180 |
| G009861 | UAGUGCAAUGGAUAGGUCUU | chr5: 61199108-61199128 | 181 |
| G009862 | AGUGCAAUGGAUAGGUCUUA | chr5: 61199109-61199129 | 182 |
| G009863 | UUACUUUGCACUUUCCUUAG | chr5: 61199186-61199206 | 183 |
| G009864 | UACUUUGCACUUUCCUUAGU | chr5: 61199187-61199207 | 184 |
| G009865 | UCUGACCUUUUAUUUUACCU | chr5: 61199238-61199258 | 185 |
| G009866 | UACUAAAACUUUAUUUUACU | chr5: 61199367-61199387 | 186 |
| G009867 | AAAGUUGAACAAUAGAAAAA | chr5: 61199401-61199421 | 187 |
| G009868 | AAUGCAUAAUCUAAGUCAAA | chr5: 61198812-61198832 | 188 |
| G009869 | AUUAUCCUGACUUUUUCUGU | chr5: 61198860-61198880 | 189 |
| G009870 | UGAAUUAUUCCUCUGUUUAA | chr5: 61198901-61198921 | 190 |
| G009871 | UAAUUUUCUUUUGCCCACUA | chr5: 61199203-61199223 | 191 |
| G009872 | AAAAGGUCAGAAUUGUUUAG | chr5: 61199229-61199249 | 192 |
| G009873 | AACAUCCUAGGUAAAAUAAA | chr5: 61199246-61199266 | 193 |
| G009874 | UAAUAAAAUUCAAACAUCCU | chr5: 61199258-61199278 | 194 |
| G009875 | UUGUCAUGUAUUUCUAAAAU | chr5: 61199322-61199342 | 195 |
| G009876 | UUUGUCAUGUAUUUCUAAAA | chr5: 61199323-61199343 | 196 |

TABLE 10
Cyno sgRNA and modification patterns

| | | SEQ | | SEQ |
|---|---|---|---|---|
| | | ID | | ID |
| Guide ID | Full Sequence | NO: | Full Sequence Modified | NO: |
| G009844 | GAGCAACCUCACUCUUGUCU | 197 | mG*mA*mG*CAACCUCACUCUU | 230 |
| | GUUUUAGAGCUAGAAAUAGC | | GUCUGUUUUAGAmGmCmUmA | |
| | AAGUUAAAAUAAGGCUAGUC | | mGmAmAmAmUmAmGmCAAGU | |
| | CGUUAUCAACUUGAAAAAGU | | UAAAAUAAGGCUAGUCCGUUA | |
| | GGCACCGAGUCGGUGCUUUU | | UCAmAmCmUmUmGmAmAmAm | |
| | | | AmAmGmUmGmGmCmAmCmCm | |
| | | | GmAmGmUmCmGmGmUmGmCm | |
| | | | U*mU*mU*mU | |
| G009845 | AGCAACCUCACUCUUGUCUG | 198 | mA*mG*mC*AACCUCACUCUUG | 231 |
| | GUUUUAGAGCUAGAAAUAGC | | UCUGGUUUUAGAmGmCmUmA | |
| | AAGUUAAAAUAAGGCUAGUC | | mGmAmAmAmUmAmGmCAAGU | |
| | CGUUAUCAACUUGAAAAAGU | | UAAAAUAAGGCUAGUCCGUUA | |
| | GGCACCGAGUCGGUGCUUUU | | UCAmAmCmUmUmGmAmAmAm | |
| | | | AmAmGmUmGmGmCmAmCmCm | |
| | | | GmAmGmUmCmGmGmUmGmCm | |
| | | | U*mU*mU*mU | |
| G009846 | ACCUCACUCUUGUCUGGGGA | 199 | mA*mC*mC*UCACUCUUGUCUG | 232 |
| | GUUUUAGAGCUAGAAAUAGC | | GGGAGUUUUAGAmGmCmUmA | |
| | AAGUUAAAAUAAGGCUAGUC | | mGmAmAmAmUmAmGmCAA | |
| | CGUUAUCAACUUGAAAAAGU | | GUUAAAAUAAGGCUAGUCCGU | |
| | GGCACCGAGUCGGUGCUUUU | | UAUCAmAmCmUmUmGmAmAm | |
| | | | AmAmAmGmUmGmGmCmAmCm | |
| | | | CmGmAmGmUmCmGmGmUmGm | |
| | | | CmU*mU*mU*mU | |
| G009847 | CCUCACUCUUGUCUGGGGAA | 200 | mC*mC*mU*CACUCUUGUCUGG | 233 |
| | GUUUUAGAGCUAGAAAUAGC | | GGAAGUUUUAGAmGmCmUmA | |
| | AAGUUAAAAUAAGGCUAGUC | | mGmAmAmAmUmAmGmCAAGU | |
| | CGUUAUCAACUUGAAAAAGU | | UAAAAUAAGGCUAGUCCGUUA | |
| | GGCACCGAGUCGGUGCUUUU | | UCAmAmCmUmUmGmAmAmAm | |
| | | | AmAmGmUmGmGmCmAmCmCm | |
| | | | GmAmGmUmCmGmGmUmGmCm | |
| | | | U*mU*mU*mU | |
| G009848 | CUCACUCUUGUCUGGGGAAG | 201 | mC*mU*mC*ACUCUUGUCUGG | 234 |
| | GUUUUAGAGCUAGAAAUAGC | | GGAAGGUUUUAGAmGmCmUm | |
| | AAGUUAAAAUAAGGCUAGUC | | AmGmAmAmAmUmAmGmCAA | |
| | CGUUAUCAACUUGAAAAAGU | | GUUAAAAUAAGGCUAGUCCGU | |
| | GGCACCGAGUCGGUGCUUUU | | UAUCAmAmCmUmUmGmAmAm | |
| | | | AmAmAmGmUmGmGmCmAmCm | |
| | | | CmGmAmGmUmCmGmGmUmGm | |
| | | | CmU*mU*mU*mU | |
| G009849 | GGGGAAGGGGAGAAAAAAAA | 202 | mG*mG*mG*GAAGGGGAGAAA | 235 |
| | GUUUUAGAGCUAGAAAUAGC | | AAAAAGUUUUAGAmGmCmUm | |
| | AAGUUAAAAUAAGGCUAGUC | | AmGmAmAmAmUmAmGmCAAG | |
| | CGUUAUCAACUUGAAAAAGU | | UUAAAAUAAGGCUAGUCCGUU | |
| | GGCACCGAGUCGGUGCUUUU | | AUCAmAmCmUmUmGmAmAmA | |
| | | | mAmAmGmUmGmGmCmAmCmC | |
| | | | mGmAmGmUmCmGmGmUmGmC | |
| | | | mU*mU*mU*mU | |
| G009850 | GGGAAGGGGAGAAAAAAAAA | 203 | mG*mG*mG*AAGGGGAGAAAA | 236 |
| | GUUUUAGAGCUAGAAAUAGC | | AAAAAGUUUUAGAmGmCmUm | |
| | AAGUUAAAAUAAGGCUAGUC | | AmGmAmAmAmUmAmGmCAAG | |
| | CGUUAUCAACUUGAAAAAGU | | UUAAAAUAAGGCUAGUCCGUU | |
| | GGCACCGAGUCGGUGCUUUU | | AUCAmAmCmUmUmGmAmAmA | |
| | | | mAmAmGmUmGmGmCmAmCmC | |
| | | | mGmAmGmUmCmGmGmUmGmC | |
| | | | mU*mU*mU*mU | |
| G009851 | AUGCAUUUGUUUCAAAAUAU | 204 | mA*mU*mG*CAUUUGUUUCAA | 237 |
| | GUUUUAGAGCUAGAAAUAGC | | AAUAUGUUUUAGAmGmCmUm | |
| | AAGUUAAAAUAAGGCUAGUC | | AmGmAmAmAmUmAmGmCAAG | |
| | CGUUAUCAACUUGAAAAAGU | | UUAAAAUAAGGCUAGUCCGUU | |
| | GGCACCGAGUCGGUGCUUUU | | AUCAmAmCmUmUmGmAmAmA | |
| | | | mAmAmGmUmGmGmCmAmCmC | |
| | | | mGmAmGmUmCmGmGmUmGmC | |
| | | | mU*mU*mU*mU | |
| G009852 | UGCAUUUGUUUCAAAAUAUU | 205 | mU*mG*mC*AUUUGUUUCAAA | 238 |
| | GUUUUAGAGCUAGAAAUAGC | | AUAUUGUUUUAGAmGmCmUm | |
| | AAGUUAAAAUAAGGCUAGUC | | AmGmAmAmAmUmAmGmCAAG | |
| | CGUUAUCAACUUGAAAAAGU | | UUAAAAUAAGGCUAGUCCGUU | |
| | GGCACCGAGUCGGUGCUUUU | | AUCAmAmCmUmUmGmAmAmA | |
| | | | mAmAmGmUmGmGmCmAmCmC | |
| | | | mGmAmGmUmCmGmGmUmGmC | |
| | | | mU*mU*mU*mU | |
| G009853 | UGAUUCCUACAGAAAAAGUC | 206 | mU*mG*mA*UUCCUACAGAAA | 239 |
| | GUUUUAGAGCUAGAAAUAGC | | AAGUCGUUUUAGAmGmCmUm | |
| | AAGUUAAAAUAAGGCUAGUC | | AmGmAmAmAmUmAmGmCAAG | |
| | CGUUAUCAACUUGAAAAAGU | | UUAAAAUAAGGCUAGUCCGUU | |
| | GGCACCGAGUCGGUGCUUUU | | AUCAmAmCmUmUmGmAmAmA | |
| | | | mAmAmGmUmGmGmCmAmCmC | |
| | | | mGmAmGmUmCmGmGmUmGmC | |
| | | | mU*mU*mU*mU | |
| G009854 | UACAGAAAAAGUCAGGAUAA | 207 | mU*mA*mC*AGAAAAAGUCAG | 240 |
| | GUUUUAGAGCUAGAAAUAGC | | GAUAAGUUUUAGAmGmCmUm | |
| | AAGUUAAAAUAAGGCUAGUC | | AmGmAmAmAmUmAmGmCAAG | |
| | CGUUAUCAACUUGAAAAAGU | | UUAAAAUAAGGCUAGUCCGUU | |
| | GGCACCGAGUCGGUGCUUUU | | AUCAmAmCmUmUmGmAmAmA | |
| | | | mAmAmGmUmGmGmCmAmCmC | |
| | | | mGmAmGmUmCmGmGmUmGmC | |
| | | | mU*mU*mU*mU | |
| G009855 | UUUCUUCUGCCUUUAAACAG | 208 | mU*mU*mU*CUUCUGCCUUUA | 241 |
| | GUUUUAGAGCUAGAAAUAGC | | AACAGGUUUUAGAmGmCmUm | |
| | AAGUUAAAAUAAGGCUAGUC | | AmGmAmAmAmUmAmGmCAAG | |
| | CGUUAUCAACUUGAAAAAGU | | UUAAAAUAAGGCUAGUCCGUU | |
| | GGCACCGAGUCGGUGCUUUU | | AUCAmAmCmUmUmGmAmAmA | |
| | | | mAmAmGmUmGmGmCmAmCmC | |
| | | | mGmAmGmUmCmGmGmUmGmC | |
| | | | mU*mU*mU*mU | |
| G009856 | UUAUAGUUUUAUAUUCAAAC | 209 | mU*mU*mA*UAGUUUUAUAUU | 242 |
| | GUUUUAGAGCUAGAAAUAGC | | CAAACGUUUUAGAmGmCmUm | |
| | AAGUUAAAAUAAGGCUAGUC | | AmGmAmAmAmUmAmGmCAAG | |
| | CGUUAUCAACUUGAAAAAGU | | UUAAAAUAAGGCUAGUCCGUU | |
| | GGCACCGAGUCGGUGCUUUU | | AUCAmAmCmUmUmGmAmAmA | |
| | | | mAmAmGmUmGmGmCmAmCmC | |
| | | | mGmAmGmUmCmGmGmUmGmC | |
| | | | mU*mU*mU*mU | |
| G009857 | AUUUAUGAGAUCAACAGCAC | 210 | mA*mU*mU*UAUGAGAUCAAC | 243 |
| | GUUUUAGAGCUAGAAAUAGC | | AGCACGUUUUAGAmGmCmUm | |
| | AAGUUAAAAUAAGGCUAGUC | | AmGmAmAmAmUmAmGmCAAG | |
| | CGUUAUCAACUUGAAAAAGU | | UUAAAAUAAGGCUAGUCCGUU | |
| | GGCACCGAGUCGGUGCUUUU | | AUCAmAmCmUmUmGmAmAmA | |
| | | | mAmAmGmUmGmGmCmAmCmC | |
| | | | mGmAmGmUmCmGmGmUmGmC | |
| | | | mU*mU*mU*mU | |
| G009858 | GAUCAACAGCACAGGUUUUG | 211 | mG*mA*mU*CAACAGCACAGG | 244 |
| | GUUUUAGAGCUAGAAAUAGC | | UUUUGGUUUUAGAmGmCmUm | |
| | AAGUUAAAAUAAGGCUAGUC | | AmGmAmAmAmUmAmGmCAAG | |
| | CGUUAUCAACUUGAAAAAGU | | UUAAAAUAAGGCUAGUCCGUU | |
| | GGCACCGAGUCGGUGCUUUU | | AUCAmAmCmUmUmGmAmAmA | |
| | | | mAmAmGmUmGmGmCmAmCmC | |
| | | | mGmAmGmUmCmGmGmUmGmC | |
| | | | mU*mU*mU*mU | |
| G009859 | UUAAAUAAAGCAUAGUGCAA | 212 | mU*mU*mA*AAUAAAGCAUAG | 245 |
| | GUUUUAGAGCUAGAAAUAGC | | UGCAAGUUUUAGAmGmCmUm | |
| | AAGUUAAAAUAAGGCUAGUC | | AmGmAmAmAmUmAmGmCAAG | |
| | CGUUAUCAACUUGAAAAAGU | | UUAAAAUAAGGCUAGUCCGUU | |
| | GGCACCGAGUCGGUGCUUUU | | AUCAmAmCmUmUmGmAmAmA | |
| | | | mAmAmGmUmGmGmCmAmCmC | |
| | | | mGmAmGmUmCmGmGmUmGmC | |
| | | | mU*mU*mU*mU | |
| G009860 | UAAAGCAUAGUGCAAUGGAU | 213 | mU*mA*mA*AGCAUAGUGCAA | 246 |
| | GUUUUAGAGCUAGAAAUAGC | | UGGAUGUUUUAGAmGmCmUm | |
| | AAGUUAAAAUAAGGCUAGUC | | AmGmAmAmAmUmAmGmCAAG | |
| | CGUUAUCAACUUGAAAAAGU | | UUAAAAUAAGGCUAGUCCGUU | |
| | GGCACCGAGUCGGUGCUUUU | | AUCAmAmCmUmUmGmAmAmA | |
| | | | mAmAmGmUmGmGmCmAmCmC | |
| | | | mGmAmGmUmCmGmGmUmGmC | |
| | | | mU*mU*mU*mU | |
| G009861 | UAGUGCAAUGGAUAGGUCUU | 214 | mU*mA*mG*UGCAAUGGAUAG | 247 |
| | GUUUUAGAGCUAGAAAUAGC | | GUCUUGUUUUAGAmGmCmUm | |
| | AAGUUAAAAUAAGGCUAGUC | | AmGmAmAmAmUmAmGmCAAG | |
| | CGUUAUCAACUUGAAAAAGU | | UUAAAAUAAGGCUAGUCCGUU | |
| | GGCACCGAGUCGGUGCUUUU | | AUCAmAmCmUmUmGmAmAmA | |
| | | | mAmAmGmUmGmGmCmAmCmC | |
| | | | mGmAmGmUmCmGmGmUmGmC | |
| | | | mU*mU*mU*mU | |
| G009862 | AGUGCAAUGGAUAGGUCUUA | 215 | mA*mG*mU*GCAAUGGAUAGG | 248 |
| | GUUUUAGAGCUAGAAAUAGC | | UCUUAGUUUUAGAmGmCmUm | |
| | AAGUUAAAAUAAGGCUAGUC | | AmGmAmAmAmUmAmGmCAAG | |
| | CGUUAUCAACUUGAAAAAGU | | UUAAAAUAAGGCUAGUCCGUU | |
| | GGCACCGAGUCGGUGCUUUU | | AUCAmAmCmUmUmGmAmAmA | |
| | | | mAmAmGmUmGmGmCmAmCmC | |
| | | | mGmAmGmUmCmGmGmUmGmC | |
| | | | mU*mU*mU*mU | |
| G009863 | UUACUUUGCACUUUCCUUAG | 216 | mU*mU*mA*CUUUGCACUUUC | 249 |
| | GUUUUAGAGCUAGAAAUAGC | | CUUAGGUUUUAGAmGmCmUm | |
| | AAGUUAAAAUAAGGCUAGUC | | AmGmAmAmAmUmAmGmCAAG | |
| | CGUUAUCAACUUGAAAAAGU | | UUAAAAUAAGGCUAGUCCGUU | |
| | GGCACCGAGUCGGUGCUUUU | | AUCAmAmCmUmUmGmAmAmA | |
| | | | mAmAmGmUmGmGmCmAmCmC | |
| | | | mGmAmGmUmCmGmGmUmGmC | |
| | | | mU*mU*mU*mU | |
| G009864 | UACUUUGCACUUUCCUUAGU | 217 | mU*mA*mC*UUUGCACUUUCC | 250 |
| | GUUUUAGAGCUAGAAAUAGC | | UUAGUGUUUUAGAmGmCmUm | |
| | AAGUUAAAAUAAGGCUAGUC | | AmGmAmAmAmUmAmGmCAAG | |
| | CGUUAUCAACUUGAAAAAGU | | UUAAAAUAAGGCUAGUCCGUU | |
| | GGCACCGAGUCGGUGCUUUU | | AUCAmAmCmUmUmGmAmAmA | |
| | | | mAmAmGmUmGmGmCmAmCmC | |
| | | | mGmAmGmUmCmGmGmUmGmC | |
| | | | mU*mU*mU*mU | |
| G009865 | UCUGACCUUUUAUUUUACCU | 218 | mU*mC*mU*GACCUUUUAUUU | 251 |
| | GUUUUAGAGCUAGAAAUAGC | | UACCUGUUUUAGAmGmCmUm | |
| | AAGUUAAAAUAAGGCUAGUC | | AmGmAmAmAmUmAmGmCAAG | |
| | CGUUAUCAACUUGAAAAAGU | | UUAAAAUAAGGCUAGUCCGUU | |
| | GGCACCGAGUCGGUGCUUUU | | AUCAmAmCmUmUmGmAmAmA | |
| | | | mAmAmGmUmGmGmCmAmCmC | |
| | | | mGmAmGmUmCmGmGmUmGmC | |
| | | | mU*mU*mU*mU | |
| G009866 | UACUAAAACUUUAUUUUACU | 219 | mU*mA*mC*UAAAACUUUAUU | 252 |
| | GUUUUAGAGCUAGAAAUAGC | | UUACUGUUUUAGAmGmCmUm | |
| | AAGUUAAAAUAAGGCUAGUC | | AmGmAmAmAmUmAmGmCAAG | |
| | CGUUAUCAACUUGAAAAAGU | | UUAAAAUAAGGCUAGUCCGUU | |
| | GGCACCGAGUCGGUGCUUUU | | AUCAmAmCmUmUmGmAmAmA | |
| | | | mAmAmGmUmGmGmCmAmCmC | |
| | | | mGmAmGmUmCmGmGmUmGmC | |
| | | | mU*mU*mU*mU | |
| G009867 | AAAGUUGAACAAUAGAAAAA | 220 | mA*mA*mA*GUUGAACAAUAG | 253 |
| | GUUUUAGAGCUAGAAAUAGC | | AAAAAGUUUUAGAmGmCmUm | |
| | AAGUUAAAAUAAGGCUAGUC | | AmGmAmAmAmUmAmGmCAAG | |
| | CGUUAUCAACUUGAAAAAGU | | UUAAAAUAAGGCUAGUCCGUU | |
| | GGCACCGAGUCGGUGCUUUU | | AUCAmAmCmUmUmGmAmAmA | |
| | | | mAmAmGmUmGmGmCmAmCmC | |
| | | | mGmAmGmUmCmGmGmUmGmC | |
| | | | mU*mU*mU*mU | |
| G009868 | AAUGCAUAAUCUAAGUCAAA | 221 | mA*mA*mU*GCAUAAUCUAAG | 254 |
| | GUUUUAGAGCUAGAAAUAGC | | UCAAAGUUUUAGAmGmCmUm | |
| | AAGUUAAAAUAAGGCUAGUC | | AmGmAmAmAmUmAmGmCAAG | |
| | CGUUAUCAACUUGAAAAAGU | | UUAAAAUAAGGCUAGUCCGUU | |
| | GGCACCGAGUCGGUGCUUUU | | AUCAmAmCmUmUmGmAmAmA | |
| | | | mAmAmGmUmGmGmCmAmCmC | |
| | | | mGmAmGmUmCmGmGmUmGmC | |
| | | | mU*mU*mU*mU | |
| G009869 | AUUAUCCUGACUUUUUCUGU | 222 | mA*mU*mU*AUCCUGACUUUU | 255 |
| | GUUUUAGAGCUAGAAAUAGC | | UCUGUGUUUUAGAmGmCmUm | |
| | AAGUUAAAAUAAGGCUAGUC | | AmGmAmAmAmUmAmGmCAAG | |
| | CGUUAUCAACUUGAAAAAGU | | UUAAAAUAAGGCUAGUCCGUU | |
| | GGCACCGAGUCGGUGCUUUU | | AUCAmAmCmUmUmGmAmAmA | |
| | | | mAmAmGmUmGmGmCmAmCmC | |
| | | | mGmAmGmUmCmGmGmUmGmC | |
| | | | mU*mU*mU*mU | |
| G009870 | UGAAUUAUUCCUCUGUUUAA | 223 | mU*mG*mA*AUUAUUCCUCUG | 256 |
| | GUUUUAGAGCUAGAAAUAGC | | UUUAAGUUUUAGAmGmCmUm | |
| | AAGUUAAAAUAAGGCUAGUC | | AmGmAmAmAmUmAmGmCAAG | |
| | CGUUAUCAACUUGAAAAAGU | | UUAAAAUAAGGCUAGUCCGUU | |
| | GGCACCGAGUCGGUGCUUUU | | AUCAmAmCmUmUmGmAmAmA | |
| | | | mAmAmGmUmGmGmCmAmCmC | |
| | | | mGmAmGmUmCmGmGmUmGmC | |
| | | | mU*mU*mU*mU | |
| G009871 | UAAUUUUCUUUUGCCCACUA | 224 | mU*mA*mA*UUUUCUUUUGCC | 257 |
| | GUUUUAGAGCUAGAAAUAGC | | CACUAGUUUUAGAmGmCmUm | |
| | AAGUUAAAAUAAGGCUAGUC | | AmGmAmAmAmUmAmGmCAAG | |
| | CGUUAUCAACUUGAAAAAGU | | UUAAAAUAAGGCUAGUCCGUU | |
| | GGCACCGAGUCGGUGCUUUU | | AUCAmAmCmUmUmGmAmAmA | |
| | | | mAmAmGmUmGmGmCmAmCmC | |
| | | | mGmAmGmUmCmGmGmUmGmC | |
| | | | mU*mU*mU*mU | |
| G009872 | AAAAGGUCAGAAUUGUUUAG | 225 | mA*mA*mA*AGGUCAGAAUUG | 258 |
| | GUUUUAGAGCUAGAAAUAGC | | UUUAGGUUUUAGAmGmCmUm | |
| | AAGUUAAAAUAAGGCUAGUC | | AmGmAmAmAmUmAmGmCAAG | |
| | CGUUAUCAACUUGAAAAAGU | | UUAAAAUAAGGCUAGUCCGUU | |
| | GGCACCGAGUCGGUGCUUUU | | AUCAmAmCmUmUmGmAmAmA | |
| | | | mAmAmGmUmGmGmCmAmCmC | |
| | | | mGmAmGmUmCmGmGmUmGmC | |
| | | | mU*mU*mU*mU | |
| G009873 | AACAUCCUAGGUAAAAUAAA | 226 | mA*mA*mC*AUCCUAGGUAAA | 259 |
| | GUUUUAGAGCUAGAAAUAGC | | AUAAAGUUUUAGAmGmCmUm | |
| | AAGUUAAAAUAAGGCUAGUC | | AmGmAmAmAmUmAmGmCAAG | |
| | CGUUAUCAACUUGAAAAAGU | | UUAAAAUAAGGCUAGUCCGUU | |
| | GGCACCGAGUCGGUGCUUUU | | AUCAmAmCmUmUmGmAmAmA | |
| | | | mAmAmGmUmGmGmCmAmCmC | |
| | | | mGmAmGmUmCmGmGmUmGmC | |
| | | | mU*mU*mU*mU | |
| G009874 | UAAUAAAAUUCAAACAUCCU | 227 | mU*mA*mA*UAAAAUUCAAAC | 260 |
| | GUUUUAGAGCUAGAAAUAGC | | AUCCUGUUUUAGAmGmCmUm | |
| | AAGUUAAAAUAAGGCUAGUC | | AmGmAmAmAmUmAmGmCAAG | |
| | CGUUAUCAACUUGAAAAAGU | | UUAAAAUAAGGCUAGUCCGUU | |
| | GGCACCGAGUCGGUGCUUUU | | AUCAmAmCmUmUmGmAmAmA | |
| | | | mAmAmGmUmGmGmCmAmCmC | |
| | | | mGmAmGmUmCmGmGmUmGmC | |
| | | | mU*mU*mU*mU | |
| G009875 | UUGUCAUGUAUUUCUAAAAU | 228 | mU*mU*mG*UCAUGUAUUUCU | 261 |
| | GUUUUAGAGCUAGAAAUAGC | | AAAAUGUUUUAGAmGmCmUm | |
| | AAGUUAAAAUAAGGCUAGUC | | AmGmAmAmAmUmAmGmCAAG | |
| | CGUUAUCAACUUGAAAAAGU | | UUAAAAUAAGGCUAGUCCGUU | |
| | GGCACCGAGUCGGUGCUUUU | | AUCAmAmCmUmUmGmAmAmA | |
| | | | mAmAmGmUmGmGmCmAmCmC | |
| | | | mGmAmGmUmCmGmGmUmGmC | |
| | | | mU*mU*mU*mU | |
| G009876 | UUUGUCAUGUAUUUCUAAAA | 229 | mU*mU*mU*GUCAUGUAUUUC | 262 |
| | GUUUUAGAGCUAGAAAUAGC | | UAAAAGUUUUAGAmGmCmUm | |
| | AAGUUAAAAUAAGGCUAGUC | | AmGmAmAmAmUmAmGmCAAG | |
| | CGUUAUCAACUUGAAAAAGU | | UUAAAAUAAGGCUAGUCCGUU | |
| | GGCACCGAGUCGGUGCUUUU | | AUCAmAmCmUmUmGmAmAmA | |
| | | | mAmAmGmUmGmGmCmAmCmC | |
| | | | mGmAmGmUmCmGmGmUmGmC | |
| | | | mU*mU*mU*mU | |

TABLE 11
Vector Components and Sequences

| | | Splice | | | | | Splice | |
|---|---|---|---|---|---|---|---|---|
| Plasmid | | Acceptor (1^{st} | Transgene (1^{st} | Poly-A (1^{st} | Poly-A (2^{nd} | Transgene (2^{nd} | Acceptor (2^{nd} | |
| ID | 5′ ITR | orientation) | orientation) | orientation) | orientation) | orientation) | orientation) | 3′ ITR |
| P00147 | (SEQ ID | Mouse | Human | SEQ ID | SEQ ID | Human | Mouse | (SEQ ID |
| | NO: 263) | Albumin | Factor IX | NO: 266 | NO: 267 | Factor IX | Albumin | NO: 270) |
| | | Splice | (R338L) | | | (R338L) | Splice | |
| | | Acceptor | (SEQ ID | | | (SEQ ID | Acceptor | |
| | | (SEQ ID | NO: 265) | | | NO: 268) | (SEQ ID | |
| | | NO: 264) | | | | | NO: 269) | |
| P00411 | (SEQ ID | Human | Human | SEQ ID | SEQ ID | Human | Human | (SEQ ID |
| | NO: 263) | Factor IX | Factor IX | NO: 266 | NO: 267 | Factor IX | Factor IX | NO: 270) |
| | | Splice | (R338L)- | | | (R338L)- | Splice | |
| | | Acceptor | HiBit | | | HiBit | Acceptor | |
| | | (SEQ ID | (SEQ ID | | | (SEQ ID | (SEQ ID | |
| | | NO: 271) | NO: 272) | | | NO: 273) | NO: 274) | |
| P00415 | (SEQ ID | Mouse | Nluc- | SEQ ID | SEQ ID | Nluc- | Mouse | (SEQ ID |
| | NO: 263) | Albumin | P2A-GFP | NO: 266 | NO: 267 | P2A-GFP | Albumin | NO: 270) |
| | | Splice | (SEQ ID | | | (SEQ ID | Splice | |
| | | Acceptor | NO: 275) | | | NO: 276) | Acceptor | |
| | | (SEQ ID | | | | | (SEQ ID | |
| | | NO: 264) | | | | | NO: 269) | |
| P00418 | (SEQ ID | Mouse | Human | SEQ ID | SEQ ID | Human | Mouse | (SEQ ID |
| | NO: 263) | Albumin | Factor IX | NO: 266 | NO: 267 | Factor IX | Albumin | NO: 270) |
| | | Splice | (R338L)- | | | (R338L)- | Splice | |
| | | Acceptor | HiBit | | | HiBit | Acceptor | |
| | | (SEQ ID | (SEQ ID | | | (SEQ ID | (SEQ ID | |
| | | NO: 264) | NO: 272) | | | NO: 273) | NO: 269) | |

5′ ITR Sequence (SEQ ID NO: 263):
TTGGCCACTCCCTCTCTGCGCGCTCGCTCGCTCACTGAGGCCGGGCGACCAAAGGTC
GCCCGACGCCCGGGCTTTGCCCGGGCGGCCTCAGTGAGCGAGCGAGCGCGCAGAGA
GGGAGTGGCCAACTCCATCACTAGGGGTTCCT
Mouse Albumin Splice Acceptor (1^{st} orientation) (SEQ ID NO: 264):
TAGGTCAGTGAAGAGAAGAACAAAAAGCAGCATATTACAGTTAGTTGTCTTCATCA
ATCTTTAAATATGTTGTGTGGTTTTTCTCTCCCTGTTTCCACAG
Human Factor IX (R338L), 1^{st} Orientation (SEQ ID NO: 265):
TTTCTTGATCATGAAAACGCCAACAAAATTCTGAATCGGCCAAAGAGGTATAATTCA
GGTAAATTGGAAGAGTTTGTTCAAGGGAACCTTGAGAGAGAATGTATGGAAGAAAA
GTGTAGTTTTGAAGAAGCACGAGAAGTTTTTGAAAACACTGAAAGAACAACTGAAT
TTTGGAAGCAGTATGTTGATGGAGATCAGTGTGAGTCCAATCCATGTTTAAATGGCG
GCAGTTGCAAGGATGACATTAATTCCTATGAATGTTGGTGTCCCTTTGGATTTGAAG
GAAAGAACTGTGAATTAGATGTAACATGTAACATTAAGAATGGCAGATGCGAGCAG
TTTTGTAAAAATAGTGCTGATAACAAGGTGGTTTGCTCCTGTACTGAGGGATATCGA
CTTGCAGAAAACCAGAAGTCCTGTGAACCAGCAGTGCCATTTCCATGTGGAAGAGTT
TCTGTTTCACAAACTTCTAAGCTCACCCGTGCTGAGACTGTTTTTCCTGATGTGGACT
ATGTAAATTCTACTGAAGCTGAAACCATTTTGGATAACATCACTCAAAGCACCCAAT
CATTTAATGACTTCACTCGGGTTGTTGGTGGAGAAGATGCCAAACCAGGTCAATTCC
CTTGGCAGGTTGTTTTGAATGGTAAAGTTGATGCATTCTGTGGAGGCTCTATCGTTA
ATGAAAAATGGATTGTAACTGCTGCCCACTGTGTTGAAACTGGTGTTAAAATTACAG
TTGTCGCAGGTGAACATAATATTGAGGAGACAGAACATACAGAGCAAAAGCGAAAT
GTGATTCGAATTATTCCTCACCACAACTACAATGCAGCTATTAATAAGTACAACCAT
GACATTGCCCTTCTGGAACTGGACGAACCCTTAGTGCTAAACAGCTACGTTACACCT
ATTTGCATTGCTGACAAGGAATACACGAACATCTTCCTCAAATTTGGATCTGGCTAT
GTAAGTGGCTGGGGAAGAGTCTTCCACAAAGGGAGATCAGCTTTAGTTCTTCAGTAC
CTTAGAGTTCCACTTGTTGACCGAGCCACATGTCTTCTATCTACAAAGTTCACCATCT
ATAACAACATGTTCTGTGCTGGCTTCCATGAAGGAGGTAGAGATTCATGTCAAGGAG
ATAGTGGGGGACCCCATGTTACTGAAGTGGAAGGGACCAGTTTCTTAACTGGAATTA
TTAGCTGGGGTGAAGAGTGTGCAATGAAAGGCAAATATGGAATATATACCAAGGTA
TCCCGGTATGTCAACTGGATTAAGGAAAAAACAAAGCTCACTTAA
Poly-A (1^{st} orientation) (SEQ ID NO: 266):
CCTCGACTGTGCCTTCTAGTTGCCAGCCATCTGTTGTTTGCCCCTCCCCCGTGCCTTC
CTTGACCCTGGAAGGTGCCACTCCCACTGTCCTTTCCTAATAAAATGAGGAAATTGC
ATCGCATTGTCTGAGTAGGTGTCATTCTATTCTGGGGGGTGGGGTGGGGCAGGACAG
CAAGGGGGAGGATTGGGAAGACAATAGCAGGCATGCTGGGGATGCGGTGGGCTCTA
TGGCTTCTGAGGCGGAAAGAACCAGCTGGGGCTCTAGGGGGTATCCCC
Poly-A (2^{nd} orientation) (SEQ ID NO: 267):
AAAAAACCTCCCACACCTCCCCCTGAACCTGAAACATAAAATGAATGCAATTGTTGT
TGTTAACTTGTTTATTGCAGCTTATAATGGTTACAAATAAAGCAATAGCATCACAAA
TTTCACAAATAAAGCATTTTTTTCACTGCATTCTAGTTGTGGTTTGTCCAAACTCATC
AATGTATCTTATCATGTCTG
Human Factor IX (R338L), 2^{nd} Orientation (SEQ ID NO: 268):
TTAGGTGAGCTTAGTCTTTTCTTTTATCCAATTCACGTAGCGAGAGACCTTCGTATAG
ATGCCATATTTCCCCTTCATCGCACATTCCTCCCCCCAACTTATTATCCCGGTCAAGA
AACTTGTTCCTTCGACTTCAGTGACGTGTGGTCCACCTGAATCACCTTGGCATGAGTC
GCGACCGCCCTCGTGAAACCCAGCACAAAACATGTTATTGTAAATCGTAAATTTCGT
GGACAGAAGACAGGTCGCTCTATCGACCAACGGGACGCGCAAATATTGCAGAACGA
GGGCTGATCGACCTTTGTGGAAGACCCGCCCCCACCCACTCACATATCCGCTCCCAA
ATTTCAAGAAGATATTTGTATATTCTTTATCGGCTATACAAATCGGGGTAACATAGG
AGTTAAGTACGAGTGGCTCGTCCAGCTCCAGGAGGGCTATATCATGGTTGTACTTGT
TTATAGCGGCATTATAATTGTGATGGGGTATGATCCTGATAACATTCCTTTTCTGTTC
AGTATGCTCAGTTTCTTCAATGTTGTGTTCGCCAGCCACGACCGTAATCTTAACCCCC
GTCTCGACACAGTGTGCGGCCGTTACAATCCACTTTTCATTGACTATGGAGCCCCCA
CAAAACGCGTCGACTTTTCCGTTGAGCACCACCTGCCATGGAAATTGGCCAGGTTTA
GCGTCCTCGCCCCCGACAACCCTAGTAAAGTCATTAAATGACTGTGTGGATTGTGTT
ATATTATCAAGAATCGTTTCGGCTTCAGTAGAGTTAACGTAGTCCACATCGGGAAAA
ACTGTCTCGGCCCTTGTCAACTTTGATGTCTGGGACACACTTACCCGACCGCACGGG
AAGGGCACCGCCGGTTCACAGCTCTTTTGATTCTCAGCGAGCCGGTAGCCCTCAGTG
CAACTACACACAACTTTGTTGTCGGCGGAATTTTTACAGAATTGCTCGCATCGTCCA
TTTTTAATGTTGCAGGTGACGTCCAACTCGCAGTTTTTTCCTTCAAAACCAAAAGGG
CACCAACACTCGTAGGAATTTATATCGTCTTTACAACTCCCCCCATTCAGACATGGA
TTAGATTCGCATTGGTCCCCATCGACATATTGCTTCCAGAACTCAGTGGTCCGTTCTG
TATTCTCAAACACCTCGCGCGCTTCTTCAAAACTGCATTTTTCCTCCATACACTCTCG
CTCCAAGTTCCCTTGCACGAATTCTTCAAGCTTTCCTGAGTTATACCTTTTAGGCCGG
TTAAGTATCTTATTCGCGTTTTCGTGGTCCAGAAA
Mouse Albumin Splice Acceptor (2^{nd} orientation) (SEQ ID NO: 269):
CTGTGGAAACAGGGAGAGAAAAACCACACAACATATTTAAAGATTGATGAAGACAA
CTAACTGTAATATGCTGCTTTTTGTTCTTCTCTTCACTGACCTA
3′ ITR Sequence (SEQ ID NO: 270):
AGGAACCCCTAGTGATGGAGTTGGCCACTCCCTCTCTGCGCGCTCGCTCGCTCACTG
AGGCCGCCCGGGCAAAGCCCGGGCGTCGGGCGACCTTTGGTCGCCCGGCCTCAGTG
AGCGAGCGAGCGCGCAGAGAGGGAGTGGCCAA
Human Factor IX Splice Acceptor (1^{st} Orientation) (SEQ ID NO: 271):
GATTATTTGGATTAAAAACAAAGACTTTCTTAAGAGATGTAAAATTTTCATGATGTT
TTCTTTTTTGCTAAAACTAAAGAATTATTCTTTTACATTTCAG
Human Factor IX (R338L)-HiBit (1^{st} Orientation) (SEQ ID NO: 272):
TTTCTTGATCATGAAAACGCCAACAAAATTCTGAATCGGCCAAAGAGGTATAATTCA
GGTAAATTGGAAGAGTTTGTTCAAGGGAACCTTGAGAGAGAATGTATGGAAGAAAA
GTGTAGTTTTGAAGAAGCACGAGAAGTTTTTGAAAACACTGAAAGAACAACTGAAT
TTTGGAAGCAGTATGTTGATGGAGATCAGTGTGAGTCCAATCCATGTTTAAATGGCG
GCAGTTGCAAGGATGACATTAATTCCTATGAATGTTGGTGTCCCTTTGGATTTGAAG
GAAAGAACTGTGAATTAGATGTAACATGTAACATTAAGAATGGCAGATGCGAGCAG
TTTTGTAAAAATAGTGCTGATAACAAGGTGGTTTGCTCCTGTACTGAGGGATATCGA
CTTGCAGAAAACCAGAAGTCCTGTGAACCAGCAGTGCCATTTCCATGTGGAAGAGTT
TCTGTTTCACAAACTTCTAAGCTCACCCGTGCTGAGACTGTTTTTCCTGATGTGGACT
ATGTAAATTCTACTGAAGCTGAAACCATTTTGGATAACATCACTCAAAGCACCCAAT
CATTTAATGACTTCACTCGGGTTGTTGGTGGAGAAGATGCCAAACCAGGTCAATTCC
CTTGGCAGGTTGTTTTGAATGGTAAAGTTGATGCATTCTGTGGAGGCTCTATCGTTA
ATGAAAAATGGATTGTAACTGCTGCCCACTGTGTTGAAACTGGTGTTAAAATTACAG
TTGTCGCAGGTGAACATAATATTGAGGAGACAGAACATACAGAGCAAAAGCGAAAT
GTGATTCGAATTATTCCTCACCACAACTACAATGCAGCTATTAATAAGTACAACCAT
GACATTGCCCTTCTGGAACTGGACGAACCCTTAGTGCTAAACAGCTACGTTACACCT
ATTTGCATTGCTGACAAGGAATACACGAACATCTTCCTCAAATTTGGATCTGGCTAT
GTAAGTGGCTGGGGAAGAGTCTTCCACAAAGGGAGATCAGCTTTAGTTCTTCAGTAC
CTTAGAGTTCCACTTGTTGACCGAGCCACATGTCTTCTATCTACAAAGTTCACCATCT
ATAACAACATGTTCTGTGCTGGCTTCCATGAAGGAGGTAGAGATTCATGTCAAGGAG
ATAGTGGGGGACCCCATGTTACTGAAGTGGAAGGGACCAGTTTCTTAACTGGAATTA
TTAGCTGGGGTGAAGAGTGTGCAATGAAAGGCAAATATGGAATATATACCAAGGTC
TCCCGGTATGTCAACTGGATTAAGGAAAAAACAAAGCTCACTGTCAGCGGATGGAG
ACTGTTCAAGAAGATCAGCTAA
Human Factor IX (R338L)-HiBit (2^{nd} Orientation) (SEQ ID NO: 273):
TTAGGAAATCTTCTTAAACAGCCGCCAGCCGCTCACGGTGAGCTTAGTCTTTTCTTTT
ATCCAATTCACGTAGCGAGAGACCTTCGTATAGATGCCATATTTCCCCTTCATCGCA
CATTCCTCCCCCCAACTTATTATCCCGGTCAAGAAACTTGTTCCTTCGACTTCAGTGA
CGTGTGGTCCACCTGAATCACCTTGGCATGAGTCGCGACCGCCCTCGTGAAACCCAG
CACAAAACATGTTATTGTAAATCGTAAATTTCGTGGACAGAAGACAGGTCGCTCTAT
CGACCAACGGGACGCGCAAATATTGCAGAACGAGGGCTGATCGACCTTTGTGGAAG
ACCCGCCCCCACCCACTCACATATCCGCTCCCAAATTTCAAGAAGATATTTGTATAT
TCTTTATCGGCTATACAAATCGGGGTAACATAGGAGTTAAGTACGAGTGGCTCGTCC
AGCTCCAGGAGGGCTATATCATGGTTGTACTTGTTTATAGCGGCATTATAATTGTGA
TGGGGTATGATCCTGATAACATTCCTTTTCTGTTCAGTATGCTCAGTTTCTTCAATGT
TGTGTTCGCCAGCCACGACCGTAATCTTAACCCCCGTCTCGACACAGTGTGCGGCCG
TTACAATCCACTTTTCATTGACTATGGAGCCCCCACAAAACGCGTCGACTTTTCCGTT
GAGCACCACCTGCCATGGAAATTGGCCAGGTTTAGCGTCCTCGCCCCCGACAACCCT
AGTAAAGTCATTAAATGACTGTGTGGATTGTGTTATATTATCAAGAATCGTTTCGGC
TTCAGTAGAGTTAACGTAGTCCACATCGGGAAAAACTGTCTCGGCCCTTGTCAACTT
TGATGTCTGGGACACACTTACCCGACCGCACGGGAAGGGCACCGCCGGTTCACAGC
TCTTTTGATTCTCAGCGAGCCGGTAGCCCTCAGTGCAACTACACACAACTTTGTTGTC
GGCGGAATTTTTACAGAATTGCTCGCATCGTCCATTTTTAATGTTGCAGGTGACGTCC
AACTCGCAGTTTTTTCCTTCAAAACCAAAAGGGCACCAACACTCGTAGGAATTTATA
TCGTCTTTACAACTCCCCCCATTCAGACATGGATTAGATTCGCATTGGTCCCCATCGA
CATATTGCTTCCAGAACTCAGTGGTCCGTTCTGTATTCTCAAACACCTCGCGCGCTTC
TTCAAAACTGCATTTTTCCTCCATACACTCTCGCTCCAAGTTCCCTTGCACGAATTCT
TCAAGCTTTCCTGAGTTATACCTTTTAGGCCGGTTAAGTATCTTATTCGCGTTTTCGT
GGTCCAGAAA
Human Factor IX Splice Acceptor (2^{nd} Orientation) (SEQ ID NO: 274):
CTGAAATGTAAAAGAATAATTCTTTAGTTTTAGCAAAAAAGAAAACATCATGAAAA
TTTTACATCTCTTAAGAAAGTCTTTGTTTTTAATCCAAATAATC
Nluc-P2A-GFP (1^{st} Orientation) (SEQ ID NO: 275):
TTTCTTGATCATGAAAACGCCAACAAAATTCTGAATCGGCCAAAGAGGTATAATTCA
GGTAAATTGGAAGAGTTTGTTCAAGGGAACCTTGAGAGAGAATGTATGGAAGAAAA
GTGTAGTTTTGAAGAAGCAGTATTCACTTTGGAGGACTTTGTCGGTGACTGGAGGCA
AACCGCTGGTTATAATCTCGACCAAGTACTGGAACAGGGCGGGGTAAGTTCCCTCTT
TCAGAATTTGGGTGTAAGCGTCACACCAATCCAGCGGATTGTGTTGTCTGGAGAGAA
CGGACTCAAAATTGACATCCATGTTATCATTCCATATGAAGGTCTCAGTGGAGACCA
AATGGGGCAGATCGAGAAGATTTTCAAGGTAGTTTACCCAGTCGACGATCACCACTT
CAAAGTCATTCTCCACTATGGCACACTTGTTATCGACGGAGTAACTCCTAATATGAT
TGATTACTTTGGTCGCCCGTATGAGGGCATCGCAGTGTTTGATGGCAAAAAGATCAC
CGTAACAGGAACGTTGTGGAATGGGAACAAGATAATCGACGAGAGATTGATAAATC
CAGACGGGTCACTCCTGTTCAGGGTTACAATTAACGGCGTCACAGGATGGAGACTCT
GTGAACGAATACTGGCCACAAATTTTTCACTCCTGAAGCAGGCCGGAGACGTGGAG
GAAAACCCAGGGCCCGTGAGCAAGGGCGAGGAGCTGTTCACCGGGGTGGTGCCCAT
CCTGGTCGAGCTGGACGGCGACGTAAACGGCCACAAGTTCAGCGTGTCCGGCGAGG
GCGAGGGCGATGCCACCTACGGCAAGCTGACCCTGAAGTTCATCTGCACCACCGGC
AAGCTGCCCGTGCCCTGGCCCACCCTCGTGACCACCCTGACCTACGGCGTGCAGTGC
TTCAGCCGCTACCCCGACCACATGAAGCAGCACGACTTCTTCAAGTCCGCCATGCCC
GAAGGCTACGTCCAGGAGCGCACCATCTTCTTCAAGGACGACGGCAACTACAAGAC
CCGCGCCGAGGTGAAGTTCGAGGGCGACACCCTGGTGAACCGCATCGAGCTGAAGG
GCATCGACTTCAAGGAGGACGGCAACATCCTGGGGCACAAGCTGGAGTACAACTAC
AACAGCCACAACGTCTATATCATGGCCGACAAGCAGAAGAACGGCATCAAGGTGAA
CTTCAAGATCCGCCACAACATCGAGGACGGCAGCGTGCAGCTCGCCGACCACTACC
AGCAGAACACCCCCATCGGCGACGGCCCCGTGCTGCTGCCCGACAACCACTACCTG
AGCACCCAGTCCGCCCTGAGCAAAGACCCCAACGAGAAGCGCGATCACATGGTCCT
GCTGGAGTTCGTGACCGCCGCCGGGATCACTCTCGGCATGGACGAGCTGTACAAGG
GAGGAGGAAGCCCGAAGAAGAAGAGAAAGGTCTAA
Nluc-P2A-GFP (2^{nd} Orientation) (SEQ ID NO: 276):
TTACACCTTCCTCTTCTTCTTGGGGCTGCCGCCGCCCTTGTACAGCTCGTCCATGCCC
AGGGTGATGCCGGCGGCGGTCACGAACTCCAGCAGCACCATGTGGTCCCTCTTCTCG
TTGGGGTCCTTGCTCAGGGCGCTCTGGGTGCTCAGGTAGTGGTTGTCGGGCAGCAGC
ACGGGGCCGTCGCCGATGGGGGTGTTCTGCTGGTAGTGGTCGGCCAGCTGCACGCTG
CCGTCCTCGATGTTGTGCCTGATCTTGAAGTTCACCTTGATGCCGTTCTTCTGCTTGT
CGGCCATGATGTACACGTTGTGGCTGTTGTAGTTGTACTCCAGCTTGTGGCCCAGGA
TGTTGCCGTCCTCCTTGAAGTCGATGCCCTTCAGCTCGATCCTGTTCACCAGGGTGTC
GCCCTCGAACTTCACCTCGGCCCTGGTCTTGTAGTTGCCGTCGTCCTTGAAGAAGAT
GGTCCTCTCCTGCACGTAGCCCTCGGGCATGGCGCTCTTGAAGAAGTCGTGCTGCTT
CATGTGGTCGGGGTACCTGCTGAAGCACTGCACGCCGTAGGTCAGGGTGGTCACCA
GGGTGGGCCAGGGCACGGGCAGCTTGCCGGTGGTGCAGATGAACTTCAGGGTCAGC
TTGCCGTAGGTGGCGTCGCCCTCGCCCTCGCCGCTCACGCTGAACTTGTGGCCGTTC
ACGTCGCCGTCCAGCTCCACCAGGATGGGCACCACGCCGGTGAACAGCTCCTCGCC
CTTGCTCACGGGGCCGGGGTTCTCCTCCACGTCGCCGGCCTGCTTCAGCAGGCTGAA
GTTGGTGGCCAGGATCCTCTCGCACAGCCTCCAGCCGGTCACGCCGTTGATGGTCAC
CCTGAACAGCAGGCTGCCGTCGGGGTTGATCAGCCTCTCGTCGATGATCTTGTTGCC
GTTCCACAGGGTGCCGGTCACGGTGATCTTCTTGCCGTCGAACACGGCGATGCCCTC
GTAGGGCCTGCCGAAGTAGTCGATCATGTTGGGGGTCACGCCGTCGATCACCAGGG
TGCCGTAGTGCAGGATCACCTTGAAGTGGTGGTCGTCCACGGGGTACACCACCTTGA
AAATCTTCTCGATCTGGCCCATCTGGTCGCCGCTCAGGCCCTCGTAGGGGATGATCA
CGTGGATGTCGATCTTCAGGCCGTTCTCGCCGCTCAGCACGATCCTCTGGATGGGGG
TCACGCTCACGCCCAGGTTCTGGAACAGGCTGCTCACGCCGCCCTGCTCCAGCACCT
GGTCCAGGTTGTAGCCGGCGGTCTGCCTCCAGTCGCCCACGAAGTCCTCCAGGGTGA
ACACGGCCTCCTCGAAGCTGCACTTCTCCTCCATGCACTCCCTCTCCAGGTTGCCCTG
CACGAACTCCTCCAGCTTGCCGCTGTTGTACCTCTTGGGCCTGTTCAGGATCTTGTTG
GCGTTCTCGTGGTCCAGGAA
P00147 full sequence (from ITR to ITR): (SEQ ID NO: 277)
TTGGCCACTCCCTCTCTGCGCGCTCGCTCGCTCACTGAGGCCGGGCGACCAAAGGTC
GCCCGACGCCCGGGCTTTGCCCGGGCGGCCTCAGTGAGCGAGCGAGCGCGCAGAGA
GGGAGTGGCCAACTCCATCACTAGGGGTTCCTAGATCTCTTAGGTCAGTGAAGAGA
AGAACAAAAAGCAGCATATTACAGTTAGTTGTCTTCATCAATCTTTAAATATGTTGT
GTGGTTTTTCTCTCCCTGTTTCCACAGTTTTTCTTGATCATGAAAACGCCAACAAAAT
TCTGAATCGGCCAAAGAGGTATAATTCAGGTAAATTGGAAGAGTTTGTTCAAGGGA
ACCTTGAGAGAGAATGTATGGAAGAAAAGTGTAGTTTTGAAGAAGCACGAGAAGTT
TTTGAAAACACTGAAAGAACAACTGAATTTTGGAAGCAGTATGTTGATGGAGATCA
GTGTGAGTCCAATCCATGTTTAAATGGCGGCAGTTGCAAGGATGACATTAATTCCTA
TGAATGTTGGTGTCCCTTTGGATTTGAAGGAAAGAACTGTGAATTAGATGTAACATG
TAACATTAAGAATGGCAGATGCGAGCAGTTTTGTAAAAATAGTGCTGATAACAAGG
TGGTTTGCTCCTGTACTGAGGGATATCGACTTGCAGAAAACCAGAAGTCCTGTGAAC
CAGCAGTGCCATTTCCATGTGGAAGAGTTTCTGTTTCACAAACTTCTAAGCTCACCC
GTGCTGAGACTGTTTTTCCTGATGTGGACTATGTAAATTCTACTGAAGCTGAAACCA
TTTTGGATAACATCACTCAAAGCACCCAATCATTTAATGACTTCACTCGGGTTGTTG
GTGGAGAAGATGCCAAACCAGGTCAATTCCCTTGGCAGGTTGTTTTGAATGGTAAAG
TTGATGCATTCTGTGGAGGCTCTATCGTTAATGAAAAATGGATTGTAACTGCTGCCC
ACTGTGTTGAAACTGGTGTTAAAATTACAGTTGTCGCAGGTGAACATAATATTGAGG
AGACAGAACATACAGAGCAAAAGCGAAATGTGATTCGAATTATTCCTCACCACAAC
TACAATGCAGCTATTAATAAGTACAACCATGACATTGCCCTTCTGGAACTGGACGAA
CCCTTAGTGCTAAACAGCTACGTTACACCTATTTGCATTGCTGACAAGGAATACACG
AACATCTTCCTCAAATTTGGATCTGGCTATGTAAGTGGCTGGGGAAGAGTCTTCCAC
AAAGGGAGATCAGCTTTAGTTCTTCAGTACCTTAGAGTTCCACTTGTTGACCGAGCC
ACATGTCTTCTATCTACAAAGTTCACCATCTATAACAACATGTTCTGTGCTGGCTTCC
ATGAAGGAGGTAGAGATTCATGTCAAGGAGATAGTGGGGGACCCCATGTTACTGAA
GTGGAAGGGACCAGTTTCTTAACTGGAATTATTAGCTGGGGTGAAGAGTGTGCAAT
GAAAGGCAAATATGGAATATATACCAAGGTATCCCGGTATGTCAACTGGATTAAGG
AAAAAACAAAGCTCACTTAACCTCGACTGTGCCTTCTAGTTGCCAGCCATCTGTTGT
TTGCCCCTCCCCCGTGCCTTCCTTGACCCTGGAAGGTGCCACTCCCACTGTCCTTTCC
TAATAAAATGAGGAAATTGCATCGCATTGTCTGAGTAGGTGTCATTCTATTCTGGGG
GGTGGGGTGGGGCAGGACAGCAAGGGGGAGGATTGGGAAGACAATAGCAGGCATG
CTGGGGATGCGGTGGGCTCTATGGCTTCTGAGGCGGAAAGAACCAGCTGGGGCTCT
AGGGGGTATCCCCAAAAAACCTCCCACACCTCCCCCTGAACCTGAAACATAAAATG
AATGCAATTGTTGTTGTTAACTTGTTTATTGCAGCTTATAATGGTTACAAATAAAGCA
ATAGCATCACAAATTTCACAAATAAAGCATTTTTTTCACTGCATTCTAGTTGTGGTTT
GTCCAAACTCATCAATGTATCTTATCATGTCTGTTAGGTGAGCTTAGTCTTTTCTTTT
ATCCAATTCACGTAGCGAGAGACCTTCGTATAGATGCCATATTTCCCCTTCATCGCA
CATTCCTCCCCCCAACTTATTATCCCGGTCAAGAAACTTGTTCCTTCGACTTCAGTGA
CGTGTGGTCCACCTGAATCACCTTGGCATGAGTCGCGACCGCCCTCGTGAAACCCAG
CACAAAACATGTTATTGTAAATCGTAAATTTCGTGGACAGAAGACAGGTCGCTCTAT
CGACCAACGGGACGCGCAAATATTGCAGAACGAGGGCTGATCGACCTTTGTGGAAG
ACCCGCCCCCACCCACTCACATATCCGCTCCCAAATTTCAAGAAGATATTTGTATAT
TCTTTATCGGCTATACAAATCGGGGTAACATAGGAGTTAAGTACGAGTGGCTCGTCC
AGCTCCAGGAGGGCTATATCATGGTTGTACTTGTTTATAGCGGCATTATAATTGTGA
TGGGGTATGATCCTGATAACATTCCTTTTCTGTTCAGTATGCTCAGTTTCTTCAATGT
TGTGTTCGCCAGCCACGACCGTAATCTTAACCCCCGTCTCGACACAGTGTGCGGCCG
TTACAATCCACTTTTCATTGACTATGGAGCCCCCACAAAACGCGTCGACTTTTCCGTT
GAGCACCACCTGCCATGGAAATTGGCCAGGTTTAGCGTCCTCGCCCCCGACAACCCT
AGTAAAGTCATTAAATGACTGTGTGGATTGTGTTATATTATCAAGAATCGTTTCGGC
TTCAGTAGAGTTAACGTAGTCCACATCGGGAAAAACTGTCTCGGCCCTTGTCAACTT
TGATGTCTGGGACACACTTACCCGACCGCACGGGAAGGGCACCGCCGGTTCACAGC
TCTTTTGATTCTCAGCGAGCCGGTAGCCCTCAGTGCAACTACACACAACTTTGTTGTC
GGCGGAATTTTTACAGAATTGCTCGCATCGTCCATTTTTAATGTTGCAGGTGACGTCC
AACTCGCAGTTTTTTCCTTCAAAACCAAAAGGGCACCAACACTCGTAGGAATTTATA
TCGTCTTTACAACTCCCCCCATTCAGACATGGATTAGATTCGCATTGGTCCCCATCGA
CATATTGCTTCCAGAACTCAGTGGTCCGTTCTGTATTCTCAAACACCTCGCGCGCTTC
TTCAAAACTGCATTTTTCCTCCATACACTCTCGCTCCAAGTTCCCTTGCACGAATTCT
TCAAGCTTTCCTGAGTTATACCTTTTAGGCCGGTTAAGTATCTTATTCGCGTTTTCGT
GGTCCAGAAAAACTGTGGAAACAGGGAGAGAAAAACCACACAACATATTTAAAGA
TTGATGAAGACAACTAACTGTAATATGCTGCTTTTTGTTCTTCTCTTCACTGACCTAA
GAGATCTAGGAACCCCTAGTGATGGAGTTGGCCACTCCCTCTCTGCGCGCTCGCTCG
CTCACTGAGGCCGCCCGGGCAAAGCCCGGGCGTCGGGCGACCTTTGGTCGCCCGGC
CTCAGTGAGCGAGCGAGCGCGCAGAGAGGGAGTGGCCAA
P00411 full sequence (from ITR to ITR): (SEQ ID NO: 278)
TTGGCCACTCCCTCTCTGCGCGCTCGCTCGCTCACTGAGGCCGGGCGACCAAAGGTC
GCCCGACGCCCGGGCTTTGCCCGGGCGGCCTCAGTGAGCGAGCGAGCGCGCAGAGA
GGGAGTGGCCAACTCCATCACTAGGGGTTCCTAGATCTCTGATTATTTGGATTAAAA
ACAAAGACTTTCTTAAGAGATGTAAAATTTTCATGATGTTTTCTTTTTTGCTAAAACT
AAAGAATTATTCTTTTACATTTCAGTTTTTCTTGATCATGAAAACGCCAACAAAATTC
TGAATCGGCCAAAGAGGTATAATTCAGGTAAATTGGAAGAGTTTGTTCAAGGGAAC
CTTGAGAGAGAATGTATGGAAGAAAAGTGTAGTTTTGAAGAAGCACGAGAAGTTTT
TGAAAACACTGAAAGAACAACTGAATTTTGGAAGCAGTATGTTGATGGAGATCAGT
GTGAGTCCAATCCATGTTTAAATGGCGGCAGTTGCAAGGATGACATTAATTCCTATG
AATGTTGGTGTCCCTTTGGATTTGAAGGAAAGAACTGTGAATTAGATGTAACATGTA
ACATTAAGAATGGCAGATGCGAGCAGTTTTGTAAAAATAGTGCTGATAACAAGGTG
GTTTGCTCCTGTACTGAGGGATATCGACTTGCAGAAAACCAGAAGTCCTGTGAACCA
GCAGTGCCATTTCCATGTGGAAGAGTTTCTGTTTCACAAACTTCTAAGCTCACCCGT
GCTGAGACTGTTTTTCCTGATGTGGACTATGTAAATTCTACTGAAGCTGAAACCATTT
TGGATAACATCACTCAAAGCACCCAATCATTTAATGACTTCACTCGGGTTGTTGGTG
GAGAAGATGCCAAACCAGGTCAATTCCCTTGGCAGGTTGTTTTGAATGGTAAAGTTG
ATGCATTCTGTGGAGGCTCTATCGTTAATGAAAAATGGATTGTAACTGCTGCCCACT
GTGTTGAAACTGGTGTTAAAATTACAGTTGTCGCAGGTGAACATAATATTGAGGAGA
CAGAACATACAGAGCAAAAGCGAAATGTGATTCGAATTATTCCTCACCACAACTAC
AATGCAGCTATTAATAAGTACAACCATGACATTGCCCTTCTGGAACTGGACGAACCC
TTAGTGCTAAACAGCTACGTTACACCTATTTGCATTGCTGACAAGGAATACACGAAC
ATCTTCCTCAAATTTGGATCTGGCTATGTAAGTGGCTGGGGAAGAGTCTTCCACAAA
GGGAGATCAGCTTTAGTTCTTCAGTACCTTAGAGTTCCACTTGTTGACCGAGCCACA
TGTCTTCTATCTACAAAGTTCACCATCTATAACAACATGTTCTGTGCTGGCTTCCATG
AAGGAGGTAGAGATTCATGTCAAGGAGATAGTGGGGGACCCCATGTTACTGAAGTG
GAAGGGACCAGTTTCTTAACTGGAATTATTAGCTGGGGTGAAGAGTGTGCAATGAA
AGGCAAATATGGAATATATACCAAGGTCTCCCGGTATGTCAACTGGATTAAGGAAA
AAACAAAGCTCACTGTCAGCGGATGGAGACTGTTCAAGAAGATCAGCTAACCTCGA
CTGTGCCTTCTAGTTGCCAGCCATCTGTTGTTTGCCCCTCCCCCGTGCCTTCCTTGAC
CCTGGAAGGTGCCACTCCCACTGTCCTTTCCTAATAAAATGAGGAAATTGCATCGCA
TTGTCTGAGTAGGTGTCATTCTATTCTGGGGGGTGGGGTGGGGCAGGACAGCAAGG
GGGAGGATTGGGAAGACAATAGCAGGCATGCTGGGGATGCGGTGGGCTCTATGGCT
TCTGAGGCGGAAAGAACCAGCTGGGGCTCTAGGGGGTATCCCCAAAAAACCTCCCA
CACCTCCCCCTGAACCTGAAACATAAAATGAATGCAATTGTTGTTGTTAACTTGTTT
ATTGCAGCTTATAATGGTTACAAATAAAGCAATAGCATCACAAATTTCACAAATAAA
GCATTTTTTTCACTGCATTCTAGTTGTGGTTTGTCCAAACTCATCAATGTATCTTATC
ATGTCTGTTAGGAAATCTTCTTAAACAGCCGCCAGCCGCTCACGGTGAGCTTAGTCT
TTTCTTTTATCCAATTCACGTAGCGAGAGACCTTCGTATAGATGCCATATTTCCCCTT
CATCGCACATTCCTCCCCCCAACTTATTATCCCGGTCAAGAAACTTGTTCCTTCGACT
TCAGTGACGTGTGGTCCACCTGAATCACCTTGGCATGAGTCGCGACCGCCCTCGTGA
AACCCAGCACAAAACATGTTATTGTAAATCGTAAATTTCGTGGACAGAAGACAGGT
CGCTCTATCGACCAACGGGACGCGCAAATATTGCAGAACGAGGGCTGATCGACCTT
TGTGGAAGACCCGCCCCCACCCACTCACATATCCGCTCCCAAATTTCAAGAAGATAT
TTGTATATTCTTTATCGGCTATACAAATCGGGGTAACATAGGAGTTAAGTACGAGTG
GCTCGTCCAGCTCCAGGAGGGCTATATCATGGTTGTACTTGTTTATAGCGGCATTAT
AATTGTGATGGGGTATGATCCTGATAACATTCCTTTTCTGTTCAGTATGCTCAGTTTC
TTCAATGTTGTGTTCGCCAGCCACGACCGTAATCTTAACCCCCGTCTCGACACAGTG
TGCGGCCGTTACAATCCACTTTTCATTGACTATGGAGCCCCCACAAAACGCGTCGAC
TTTTCCGTTGAGCACCACCTGCCATGGAAATTGGCCAGGTTTAGCGTCCTCGCCCCC
GACAACCCTAGTAAAGTCATTAAATGACTGTGTGGATTGTGTTATATTATCAAGAAT
CGTTTCGGCTTCAGTAGAGTTAACGTAGTCCACATCGGGAAAAACTGTCTCGGCCCT
TGTCAACTTTGATGTCTGGGACACACTTACCCGACCGCACGGGAAGGGCACCGCCG
GTTCACAGCTCTTTTGATTCTCAGCGAGCCGGTAGCCCTCAGTGCAACTACACACAA
CTTTGTTGTCGGCGGAATTTTTACAGAATTGCTCGCATCGTCCATTTTTAATGTTGCA
GGTGACGTCCAACTCGCAGTTTTTTCCTTCAAAACCAAAAGGGCACCAACACTCGTA
GGAATTTATATCGTCTTTACAACTCCCCCCATTCAGACATGGATTAGATTCGCATTGG
TCCCCATCGACATATTGCTTCCAGAACTCAGTGGTCCGTTCTGTATTCTCAAACACCT
CGCGCGCTTCTTCAAAACTGCATTTTTCCTCCATACACTCTCGCTCCAAGTTCCCTTG
CACGAATTCTTCAAGCTTTCCTGAGTTATACCTTTTAGGCCGGTTAAGTATCTTATTC
GCGTTTTCGTGGTCCAGAAAAACTGAAATGTAAAAGAATAATTCTTTAGTTTTAGCA
AAAAAGAAAACATCATGAAAATTTTACATCTCTTAAGAAAGTCTTTGTTTTTAATCC
AAATAATCAGAGATCTAGGAACCCCTAGTGATGGAGTTGGCCACTCCCTCTCTGCGC
GCTCGCTCGCTCACTGAGGCCGCCCGGGCAAAGCCCGGGCGTCGGGCGACCTTTGG
TCGCCCGGCCTCAGTGAGCGAGCGAGCGCGCAGAGAGGGAGTGGCCAA
P00415 full sequence (from ITR to ITR): (SEQ ID NO: 279)
TTGGCCACTCCCTCTCTGCGCGCTCGCTCGCTCACTGAGGCCGGGCGACCAAAGGTC
GCCCGACGCCCGGGCTTTGCCCGGGCGGCCTCAGTGAGCGAGCGAGCGCGCAGAGA
GGGAGTGGCCAACTCCATCACTAGGGGTTCCTAGATCTCTTAGGTCAGTGAAGAGA
AGAACAAAAAGCAGCATATTACAGTTAGTTGTCTTCATCAATCTTTAAATATGTTGT
GTGGTTTTTCTCTCCCTGTTTCCACAGTTTTTCTTGATCATGAAAACGCCAACAAAAT
TCTGAATCGGCCAAAGAGGTATAATTCAGGTAAATTGGAAGAGTTTGTTCAAGGGA
ACCTTGAGAGAGAATGTATGGAAGAAAAGTGTAGTTTTGAAGAAGCAGTATTCACT
TTGGAGGACTTTGTCGGTGACTGGAGGCAAACCGCTGGTTATAATCTCGACCAAGTA
CTGGAACAGGGCGGGGTAAGTTCCCTCTTTCAGAATTTGGGTGTAAGCGTCACACCA
ATCCAGCGGATTGTGTTGTCTGGAGAGAACGGACTCAAAATTGACATCCATGTTATC
ATTCCATATGAAGGTCTCAGTGGAGACCAAATGGGGCAGATCGAGAAGATTTTCAA
GGTAGTTTACCCAGTCGACGATCACCACTTCAAAGTCATTCTCCACTATGGCACACT
TGTTATCGACGGAGTAACTCCTAATATGATTGATTACTTTGGTCGCCCGTATGAGGG
CATCGCAGTGTTTGATGGCAAAAAGATCACCGTAACAGGAACGTTGTGGAATGGGA
ACAAGATAATCGACGAGAGATTGATAAATCCAGACGGGTCACTCCTGTTCAGGGTT
ACAATTAACGGCGTCACAGGATGGAGACTCTGTGAACGAATACTGGCCACAAATTT
TTCACTCCTGAAGCAGGCCGGAGACGTGGAGGAAAACCCAGGGCCCGTGAGCAAGG
GCGAGGAGCTGTTCACCGGGGTGGTGCCCATCCTGGTCGAGCTGGACGGCGACGTA
AACGGCCACAAGTTCAGCGTGTCCGGCGAGGGCGAGGGCGATGCCACCTACGGCAA
GCTGACCCTGAAGTTCATCTGCACCACCGGCAAGCTGCCCGTGCCCTGGCCCACCCT
CGTGACCACCCTGACCTACGGCGTGCAGTGCTTCAGCCGCTACCCCGACCACATGAA
GCAGCACGACTTCTTCAAGTCCGCCATGCCCGAAGGCTACGTCCAGGAGCGCACCA
TCTTCTTCAAGGACGACGGCAACTACAAGACCCGCGCCGAGGTGAAGTTCGAGGGC
GACACCCTGGTGAACCGCATCGAGCTGAAGGGCATCGACTTCAAGGAGGACGGCAA
CATCCTGGGGCACAAGCTGGAGTACAACTACAACAGCCACAACGTCTATATCATGG
CCGACAAGCAGAAGAACGGCATCAAGGTGAACTTCAAGATCCGCCACAACATCGAG
GACGGCAGCGTGCAGCTCGCCGACCACTACCAGCAGAACACCCCCATCGGCGACGG
CCCCGTGCTGCTGCCCGACAACCACTACCTGAGCACCCAGTCCGCCCTGAGCAAAG
ACCCCAACGAGAAGCGCGATCACATGGTCCTGCTGGAGTTCGTGACCGCCGCCGGG
ATCACTCTCGGCATGGACGAGCTGTACAAGGGAGGAGGAAGCCCGAAGAAGAAGA
GAAAGGTCTAACCTCGACTGTGCCTTCTAGTTGCCAGCCATCTGTTGTTTGCCCCTCC
CCCGTGCCTTCCTTGACCCTGGAAGGTGCCACTCCCACTGTCCTTTCCTAATAAAATG
AGGAAATTGCATCGCATTGTCTGAGTAGGTGTCATTCTATTCTGGGGGGTGGGGTGG
GGCAGGACAGCAAGGGGGAGGATTGGGAAGACAATAGCAGGCATGCTGGGGATGC
GGTGGGCTCTATGGCTTCTGAGGCGGAAAGAACCAGCTGGGGCTCTAGGGGGTATC
CCCAAAAAACCTCCCACACCTCCCCCTGAACCTGAAACATAAAATGAATGCAATTGT
TGTTGTTAACTTGTTTATTGCAGCTTATAATGGTTACAAATAAAGCAATAGCATCAC
AAATTTCACAAATAAAGCATTTTTTTCACTGCATTCTAGTTGTGGTTTGTCCAAACTC
ATCAATGTATCTTATCATGTCTGTTACACCTTCCTCTTCTTCTTGGGGCTGCCGCCGC
CCTTGTACAGCTCGTCCATGCCCAGGGTGATGCCGGCGGCGGTCACGAACTCCAGCA
GCACCATGTGGTCCCTCTTCTCGTTGGGGTCCTTGCTCAGGGCGCTCTGGGTGCTCAG
GTAGTGGTTGTCGGGCAGCAGCACGGGGCCGTCGCCGATGGGGGTGTTCTGCTGGT
AGTGGTCGGCCAGCTGCACGCTGCCGTCCTCGATGTTGTGCCTGATCTTGAAGTTCA
CCTTGATGCCGTTCTTCTGCTTGTCGGCCATGATGTACACGTTGTGGCTGTTGTAGTT
GTACTCCAGCTTGTGGCCCAGGATGTTGCCGTCCTCCTTGAAGTCGATGCCCTTCAG
CTCGATCCTGTTCACCAGGGTGTCGCCCTCGAACTTCACCTCGGCCCTGGTCTTGTAG
TTGCCGTCGTCCTTGAAGAAGATGGTCCTCTCCTGCACGTAGCCCTCGGGCATGGCG
CTCTTGAAGAAGTCGTGCTGCTTCATGTGGTCGGGGTACCTGCTGAAGCACTGCACG
CCGTAGGTCAGGGTGGTCACCAGGGTGGGCCAGGGCACGGGCAGCTTGCCGGTGGT
GCAGATGAACTTCAGGGTCAGCTTGCCGTAGGTGGCGTCGCCCTCGCCCTCGCCGCT
CACGCTGAACTTGTGGCCGTTCACGTCGCCGTCCAGCTCCACCAGGATGGGCACCAC
GCCGGTGAACAGCTCCTCGCCCTTGCTCACGGGGCCGGGGTTCTCCTCCACGTCGCC
GGCCTGCTTCAGCAGGCTGAAGTTGGTGGCCAGGATCCTCTCGCACAGCCTCCAGCC
GGTCACGCCGTTGATGGTCACCCTGAACAGCAGGCTGCCGTCGGGGTTGATCAGCCT
CTCGTCGATGATCTTGTTGCCGTTCCACAGGGTGCCGGTCACGGTGATCTTCTTGCCG
TCGAACACGGCGATGCCCTCGTAGGGCCTGCCGAAGTAGTCGATCATGTTGGGGGTC
ACGCCGTCGATCACCAGGGTGCCGTAGTGCAGGATCACCTTGAAGTGGTGGTCGTCC
ACGGGGTACACCACCTTGAAAATCTTCTCGATCTGGCCCATCTGGTCGCCGCTCAGG
CCCTCGTAGGGGATGATCACGTGGATGTCGATCTTCAGGCCGTTCTCGCCGCTCAGC
ACGATCCTCTGGATGGGGGTCACGCTCACGCCCAGGTTCTGGAACAGGCTGCTCACG
CCGCCCTGCTCCAGCACCTGGTCCAGGTTGTAGCCGGCGGTCTGCCTCCAGTCGCCC
ACGAAGTCCTCCAGGGTGAACACGGCCTCCTCGAAGCTGCACTTCTCCTCCATGCAC
TCCCTCTCCAGGTTGCCCTGCACGAACTCCTCCAGCTTGCCGCTGTTGTACCTCTTGG
GCCTGTTCAGGATCTTGTTGGCGTTCTCGTGGTCCAGGAA
P00418 full sequence (from ITR to ITR): (SEQ ID NO: 280)
TTGGCCACTCCCTCTCTGCGCGCTCGCTCGCTCACTGAGGCCGGGCGACCAAAGGTC
GCCCGACGCCCGGGCTTTGCCCGGGCGGCCTCAGTGAGCGAGCGAGCGCGCAGAGA
GGGAGTGGCCAACTCCATCACTAGGGGTTCCTAGATCTCTTAGGTCAGTGAAGAGA
AGAACAAAAAGCAGCATATTACAGTTAGTTGTCTTCATCAATCTTTAAATATGTTGT
GTGGTTTTTCTCTCCCTGTTTCCACAGTTTTTCTTGATCATGAAAACGCCAACAAAAT
TCTGAATCGGCCAAAGAGGTATAATTCAGGTAAATTGGAAGAGTTTGTTCAAGGGA
ACCTTGAGAGAGAATGTATGGAAGAAAAGTGTAGTTTTGAAGAAGCACGAGAAGTT
TTTGAAAACACTGAAAGAACAACTGAATTTTGGAAGCAGTATGTTGATGGAGATCA
GTGTGAGTCCAATCCATGTTTAAATGGCGGCAGTTGCAAGGATGACATTAATTCCTA
TGAATGTTGGTGTCCCTTTGGATTTGAAGGAAAGAACTGTGAATTAGATGTAACATG
TAACATTAAGAATGGCAGATGCGAGCAGTTTTGTAAAAATAGTGCTGATAACAAGG
TGGTTTGCTCCTGTACTGAGGGATATCGACTTGCAGAAAACCAGAAGTCCTGTGAAC
CAGCAGTGCCATTTCCATGTGGAAGAGTTTCTGTTTCACAAACTTCTAAGCTCACCC
GTGCTGAGACTGTTTTTCCTGATGTGGACTATGTAAATTCTACTGAAGCTGAAACCA
TTTTGGATAACATCACTCAAAGCACCCAATCATTTAATGACTTCACTCGGGTTGTTG
GTGGAGAAGATGCCAAACCAGGTCAATTCCCTTGGCAGGTTGTTTTGAATGGTAAAG
TTGATGCATTCTGTGGAGGCTCTATCGTTAATGAAAAATGGATTGTAACTGCTGCCC
ACTGTGTTGAAACTGGTGTTAAAATTACAGTTGTCGCAGGTGAACATAATATTGAGG
AGACAGAACATACAGAGCAAAAGCGAAATGTGATTCGAATTATTCCTCACCACAAC
TACAATGCAGCTATTAATAAGTACAACCATGACATTGCCCTTCTGGAACTGGACGAA
CCCTTAGTGCTAAACAGCTACGTTACACCTATTTGCATTGCTGACAAGGAATACACG
AACATCTTCCTCAAATTTGGATCTGGCTATGTAAGTGGCTGGGGAAGAGTCTTCCAC
AAAGGGAGATCAGCTTTAGTTCTTCAGTACCTTAGAGTTCCACTTGTTGACCGAGCC
ACATGTCTTCTATCTACAAAGTTCACCATCTATAACAACATGTTCTGTGCTGGCTTCC
ATGAAGGAGGTAGAGATTCATGTCAAGGAGATAGTGGGGGACCCCATGTTACTGAA
GTGGAAGGGACCAGTTTCTTAACTGGAATTATTAGCTGGGGTGAAGAGTGTGCAAT
GAAAGGCAAATATGGAATATATACCAAGGTCTCCCGGTATGTCAACTGGATTAAGG
AAAAAACAAAGCTCACTGTCAGCGGATGGAGACTGTTCAAGAAGATCAGCTAACCT
CGACTGTGCCTTCTAGTTGCCAGCCATCTGTTGTTTGCCCCTCCCCCGTGCCTTCCTT
GACCCTGGAAGGTGCCACTCCCACTGTCCTTTCCTAATAAAATGAGGAAATTGCATC
GCATTGTCTGAGTAGGTGTCATTCTATTCTGGGGGGTGGGGTGGGGCAGGACAGCA
AGGGGGAGGATTGGGAAGACAATAGCAGGCATGCTGGGGATGCGGTGGGCTCTATG
GCTTCTGAGGCGGAAAGAACCAGCTGGGGCTCTAGGGGGTATCCCCAAAAAACCTC
CCACACCTCCCCCTGAACCTGAAACATAAAATGAATGCAATTGTTGTTGTTAACTTG
TTTATTGCAGCTTATAATGGTTACAAATAAAGCAATAGCATCACAAATTTCACAAAT
AAAGCATTTTTTTCACTGCATTCTAGTTGTGGTTTGTCCAAACTCATCAATGTATCTT
ATCATGTCTGTTAGGAAATCTTCTTAAACAGCCGCCAGCCGCTCACGGTGAGCTTAG
TCTTTTCTTTTATCCAATTCACGTAGCGAGAGACCTTCGTATAGATGCCATATTTCCC
CTTCATCGCACATTCCTCCCCCCAACTTATTATCCCGGTCAAGAAACTTGTTCCTTCG
ACTTCAGTGACGTGTGGTCCACCTGAATCACCTTGGCATGAGTCGCGACCGCCCTCG
TGAAACCCAGCACAAAACATGTTATTGTAAATCGTAAATTTCGTGGACAGAAGACA
GGTCGCTCTATCGACCAACGGGACGCGCAAATATTGCAGAACGAGGGCTGATCGAC
CTTTGTGGAAGACCCGCCCCCACCCACTCACATATCCGCTCCCAAATTTCAAGAAGA
TATTTGTATATTCTTTATCGGCTATACAAATCGGGGTAACATAGGAGTTAAGTACGA
GTGGCTCGTCCAGCTCCAGGAGGGCTATATCATGGTTGTACTTGTTTATAGCGGCAT
TATAATTGTGATGGGGTATGATCCTGATAACATTCCTTTTCTGTTCAGTATGCTCAGT
TTCTTCAATGTTGTGTTCGCCAGCCACGACCGTAATCTTAACCCCCGTCTCGACACA
GTGTGCGGCCGTTACAATCCACTTTTCATTGACTATGGAGCCCCCACAAAACGCGTC
GACTTTTCCGTTGAGCACCACCTGCCATGGAAATTGGCCAGGTTTAGCGTCCTCGCC
CCCGACAACCCTAGTAAAGTCATTAAATGACTGTGTGGATTGTGTTATATTATCAAG
AATCGTTTCGGCTTCAGTAGAGTTAACGTAGTCCACATCGGGAAAAACTGTCTCGGC
CCTTGTCAACTTTGATGTCTGGGACACACTTACCCGACCGCACGGGAAGGGCACCGC
CGGTTCACAGCTCTTTTGATTCTCAGCGAGCCGGTAGCCCTCAGTGCAACTACACAC
AACTTTGTTGTCGGCGGAATTTTTACAGAATTGCTCGCATCGTCCATTTTTAATGTTG
CAGGTGACGTCCAACTCGCAGTTTTTTCCTTCAAAACCAAAAGGGCACCAACACTCG
TAGGAATTTATATCGTCTTTACAACTCCCCCCATTCAGACATGGATTAGATTCGCATT
GGTCCCCATCGACATATTGCTTCCAGAACTCAGTGGTCCGTTCTGTATTCTCAAACAC
CTCGCGCGCTTCTTCAAAACTGCATTTTTCCTCCATACACTCTCGCTCCAAGTTCCCT
TGCACGAATTCTTCAAGCTTTCCTGAGTTATACCTTTTAGGCCGGTTAAGTATCTTAT
TCGCGTTTTCGTGGTCCAGAAAAACTGTGGAAACAGGGAGAGAAAAACCACACAAC
ATATTTAAAGATTGATGAAGACAACTAACTGTAATATGCTGCTTTTTGTTCTTCTCTT
CACTGACCTAAGAGATCTAGGAACCCCTAGTGATGGAGTTGGCCACTCCCTCTCTGC
GCGCTCGCTCGCTCACTGAGGCCGCCCGGGCAAAGCCCGGGCGTCGGGCGACCTTT
GGTCGCCCGGCCTCAGTGAGCGAGCGAGCGCGCAGAGAGGGAGTGGCCAA
P00123 full sequence (from ITR to ITR): (SEQ ID NO: 281)
GGCCACTCCCTCTCTGCGCGCTCGCTCGCTCACTGAGGCCGGGCGACCAAAGGTCGC
CCGACGCCCGGGCTTTGCCCGGGCGGCCTCAGTGAGCGAGCGAGCGCGCAGAGAGG
GAGTGGCCAACTCCATCACTAGGGGTTCCTGGAGGGGTGGAGTCGTGATAGGTCAG
TGAAGAGAAGAACAAAAAGCAGCATATTACAGTTAGTTGTCTTCATCAATCTTTAAA
TATGTTGTGTGGTTTTTCTCTCCCTGTTTCCACAGTTTTTCTTGATCATGAAAACGCCA
ACAAAATTCTGAATCGGCCAAAGAGGTATAATTCAGGTAAATTGGAAGAGTTTGTTC
AAGGGAACCTTGAGAGAGAATGTATGGAAGAAAAGTGTAGTTTTGAAGAAGCACGA
GAAGTTTTTGAAAACACTGAAAGAACAACTGAATTTTGGAAGCAGTATGTTGATGG
AGATCAGTGTGAGTCCAATCCATGTTTAAATGGCGGCAGTTGCAAGGATGACATTAA
TTCCTATGAATGTTGGTGTCCCTTTGGATTTGAAGGAAAGAACTGTGAATTAGATGT
AACATGTAACATTAAGAATGGCAGATGCGAGCAGTTTTGTAAAAATAGTGCTGATA
ACAAGGTGGTTTGCTCCTGTACTGAGGGATATCGACTTGCAGAAAACCAGAAGTCCT
GTGAACCAGCAGTGCCATTTCCATGTGGAAGAGTTTCTGTTTCACAAACTTCTAAGC
TCACCCGTGCTGAGACTGTTTTTCCTGATGTGGACTATGTAAATTCTACTGAAGCTGA
AACCATTTTGGATAACATCACTCAAAGCACCCAATCATTTAATGACTTCACTCGGGT
TGTTGGTGGAGAAGATGCCAAACCAGGTCAATTCCCTTGGCAGGTTGTTTTGAATGG
TAAAGTTGATGCATTCTGTGGAGGCTCTATCGTTAATGAAAAATGGATTGTAACTGC
TGCCCACTGTGTTGAAACTGGTGTTAAAATTACAGTTGTCGCAGGTGAACATAATAT
TGAGGAGACAGAACATACAGAGCAAAAGCGAAATGTGATTCGAATTATTCCTCACC
ACAACTACAATGCAGCTATTAATAAGTACAACCATGACATTGCCCTTCTGGAACTGG
ACGAACCCTTAGTGCTAAACAGCTACGTTACACCTATTTGCATTGCTGACAAGGAAT
ACACGAACATCTTCCTCAAATTTGGATCTGGCTATGTAAGTGGCTGGGGAAGAGTCT
TCCACAAAGGGAGATCAGCTTTAGTTCTTCAGTACCTTAGAGTTCCACTTGTTGACC
GAGCCACATGTCTTCTATCTACAAAGTTCACCATCTATAACAACATGTTCTGTGCTG
GCTTCCATGAAGGAGGTAGAGATTCATGTCAAGGAGATAGTGGGGGACCCCATGTT
ACTGAAGTGGAAGGGACCAGTTTCTTAACTGGAATTATTAGCTGGGGTGAAGAGTG
TGCAATGAAAGGCAAATATGGAATATATACCAAGGTATCCCGGTATGTCAACTGGA
TTAAGGAAAAAACAAAGCTCACTTAACCTCGACTGTGCCTTCTAGTTGCCAGCCATC
TGTTGTTTGCCCCTCCCCCGTGCCTTCCTTGACCCTGGAAGGTGCCACTCCCACTGTC
CTTTCCTAATAAAATGAGGAAATTGCATCGCATTGTCTGAGTAGGTGTCATTCTATTC
TGGGGGGTGGGGTGGGGCAGGACAGCAAGGGGGAGGATTGGGAAGACAATAGCAG
GCATGCTGGGGATGCGGTGGGCTCTATGGCTTCTGAGGCGGAAAGAACCAGCTGGG
GCTCTAGGGGGTATCCCCACTAGTCCACTCCCTCTCTGCGCGCTCGCTCGCTCACTG
AGGCCGGGCGACCAAAGGTCGCCCGACGCCCGGGCTTTGCCCGGGCGGCCTCAGTG
AGCGAGCGAGCGCGCAGAGAGGGA
P00204 full sequence (from ITR to ITR): (SEQ ID NO: 282)
GGCCACTCCCTCTCTGCGCGCTCGCTCGCTCACTGAGGCCGGGCGACCAAAGGTCGC
CCGACGCCCGGGCTTTGCCCGGGCGGCCTCAGTGAGCGAGCGAGCGCGCAGAGAGG
GAGTGGCCAACTCCATCACTAGGGGTTCCTGGAGGGGTGGAGTCGTGACCTAGGTC
GTCTCCGGCTCTGCTTTTTCCAGGGGTGTGTTTCGCCGAGAAGCACGTAAGAGTTTT
ATGTTTTTTCATCTCTGCTTGTATTTTTCTAGTAATGGAAGCCTGGTATTTTAAAATA
GTTAAATTTTCCTTTAGTGCTGATTTCTAGATTATTATTACTGTTGTTGTTGTTATTAT
TGTCATTATTTGCATCTGAGAACTAGGTCAGTGAAGAGAAGAACAAAAAGCAGCAT
ATTACAGTTAGTTGTCTTCATCAATCTTTAAATATGTTGTGTGGTTTTTCTCTCCCTGT
TTCCACAGTTTTTCTTGATCATGAAAACGCCAACAAAATTCTGAATCGGCCAAAGAG
GTATAATTCAGGTAAATTGGAAGAGTTTGTTCAAGGGAACCTTGAGAGAGAATGTA
TGGAAGAAAAGTGTAGTTTTGAAGAAGCACGAGAAGTTTTTGAAAACACTGAAAGA
ACAACTGAATTTTGGAAGCAGTATGTTGATGGAGATCAGTGTGAGTCCAATCCATGT
TTAAATGGCGGCAGTTGCAAGGATGACATTAATTCCTATGAATGTTGGTGTCCCTTT
GGATTTGAAGGAAAGAACTGTGAATTAGATGTAACATGTAACATTAAGAATGGCAG
ATGCGAGCAGTTTTGTAAAAATAGTGCTGATAACAAGGTGGTTTGCTCCTGTACTGA
GGGATATCGACTTGCAGAAAACCAGAAGTCCTGTGAACCAGCAGTGCCATTTCCAT
GTGGAAGAGTTTCTGTTTCACAAACTTCTAAGCTCACCCGTGCTGAGACTGTTTTTCC
TGATGTGGACTATGTAAATTCTACTGAAGCTGAAACCATTTTGGATAACATCACTCA
AAGCACCCAATCATTTAATGACTTCACTCGGGTTGTTGGTGGAGAAGATGCCAAACC
AGGTCAATTCCCTTGGCAGGTTGTTTTGAATGGTAAAGTTGATGCATTCTGTGGAGG
CTCTATCGTTAATGAAAAATGGATTGTAACTGCTGCCCACTGTGTTGAAACTGGTGT
TAAAATTACAGTTGTCGCAGGTGAACATAATATTGAGGAGACAGAACATACAGAGC
AAAAGCGAAATGTGATTCGAATTATTCCTCACCACAACTACAATGCAGCTATTAATA
AGTACAACCATGACATTGCCCTTCTGGAACTGGACGAACCCTTAGTGCTAAACAGCT
ACGTTACACCTATTTGCATTGCTGACAAGGAATACACGAACATCTTCCTCAAATTTG
GATCTGGCTATGTAAGTGGCTGGGGAAGAGTCTTCCACAAAGGGAGATCAGCTTTA
GTTCTTCAGTACCTTAGAGTTCCACTTGTTGACCGAGCCACATGTCTTCTATCTACAA
AGTTCACCATCTATAACAACATGTTCTGTGCTGGCTTCCATGAAGGAGGTAGAGATT
CATGTCAAGGAGATAGTGGGGGACCCCATGTTACTGAAGTGGAAGGGACCAGTTTC
TTAACTGGAATTATTAGCTGGGGTGAAGAGTGTGCAATGAAAGGCAAATATGGAAT
ATATACCAAGGTATCCCGGTATGTCAACTGGATTAAGGAAAAAACAAAGCTCACTT
AACCTCGACTGTGCCTTCTAGTTGCCAGCCATCTGTTGTTTGCCCCTCCCCCGTGCCT
TCCTTGACCCTGGAAGGTGCCACTCCCACTGTCCTTTCCTAATAAAATGAGGAAATT
GCATCGCATTGTCTGAGTAGGTGTCATTCTATTCTGGGGGGTGGGGTGGGGCAGGAC
AGCAAGGGGGAGGATTGGGAAGACAATAGCAGGCATGCTGGGGATGCGGTGGGCT
CTATGGCTTCTGAGGCGGAAAGAACCAGCTGGGGCTCTAGGGGGTATCCCCCTTAG
GTGGTTATATTATTGATATATTTTTGGTATCTTTGATGACAATAATGGGGGATTTTGA
AAGCTTAGCTTTAAATTTCTTTTAATTAAAAAAAAATGCTAGGCAGAATGACTCAAA
TTACGTTGGATACAGTTGAATTTATTACGGTCTCATAGGGCCTGCCTGCTCGACCAT
GCTATACTAAAAATTAAAAGTGTACTAGTCCACTCCCTCTCTGCGCGCTCGCTCGCT
CACTGAGGCCGGGCGACCAAAGGTCGCCCGACGCCCGGGCTTTGCCCGGGCGGCCT
CAGTGAGCGAGCGAGCGCGCAGAGAGGGA
P00353 full sequence (from ITR to ITR): (SEQ ID NO: 283)
TTGGCCACTCCCTCTCTGCGCGCTCGCTCGCTCACTGAGGCCGGGCGACCAAAGGTC
GCCCGACGCCCGGGCTTTGCCCGGGCGGCCTCAGTGAGCGAGCGAGCGCGCAGAGA
GGGAGTGGCCAACTCCATCACTAGGGGTTCCTAGATCTGATTTTGAAAGCTTAGCTT
TAAATTTCTTTTAATTAAAAAAAAATGCTAGGCAGAATGACTCAAATTACGTTGGAT
ACAGTTGAATTTATTACGGTCTCATAGGGCCTGCCTGCTCGACCATGCTATACTAAA
AATTAAAAGTGTGTGTTACTAATTTTATAAATGGAGTTTCCATTTATATTTACCTTTA
TTTCTTATTTACCATTGTCTTAGTAGATATTTACAAACATGACAGAAACACTAAATCT
TGAGTTTGAATGCACAGATATAAACACTTAACGGGTTTTAAAAATAATAATGTTGGT
GAAAAAATATAACTTTGAGTGTAGCAGAGAGGAACCATTGCCACCTTCAGATTTTCC
TGTAACGATCGGGAACTGGCATCTTCAGGGAGTAGCTTAGGTCAGTGAAGAGAAGA
ACAAAAAGCAGCATATTACAGTTAGTTGTCTTCATCAATCTTTAAATATGTTGTGTG
GTTTTTCTCTCCCTGTTTCCACAGTTTTTCTTGATCATGAAAACGCCAACAAAATTCT
GAATCGGCCAAAGAGGTTTCTTGATCATGAAAACGCCAACAAAATTCTGAATCGGC
CAAAGAGGTATAATTCAGGTAAATTGGAAGAGTTTGTTCAAGGGAACCTTGAGAGA
GAATGTATGGAAGAAAAGTGTAGTTTTGAAGAAGCACGAGAAGTTTTTGAAAACAC
TGAAAGAACAACTGAATTTTGGAAGCAGTATGTTGATGGAGATCAGTGTGAGTCCA
ATCCATGTTTAAATGGCGGCAGTTGCAAGGATGACATTAATTCCTATGAATGTTGGT
GTCCCTTTGGATTTGAAGGAAAGAACTGTGAATTAGATGTAACATGTAACATTAAGA
ATGGCAGATGCGAGCAGTTTTGTAAAAATAGTGCTGATAACAAGGTGGTTTGCTCCT
GTACTGAGGGATATCGACTTGCAGAAAACCAGAAGTCCTGTGAACCAGCAGTGCCA
TTTCCATGTGGAAGAGTTTCTGTTTCACAAACTTCTAAGCTCACCCGTGCTGAGACTG
TTTTTCCTGATGTGGACTATGTAAATTCTACTGAAGCTGAAACCATTTTGGATAACAT
CACTCAAAGCACCCAATCATTTAATGACTTCACTCGGGTTGTTGGTGGAGAAGATGC
CAAACCAGGTCAATTCCCTTGGCAGGTTGTTTTGAATGGTAAAGTTGATGCATTCTG
TGGAGGCTCTATCGTTAATGAAAAATGGATTGTAACTGCTGCCCACTGTGTTGAAAC
TGGTGTTAAAATTACAGTTGTCGCAGGTGAACATAATATTGAGGAGACAGAACATA
CAGAGCAAAAGCGAAATGTGATTCGAATTATTCCTCACCACAACTACAATGCAGCT
ATTAATAAGTACAACCATGACATTGCCCTTCTGGAACTGGACGAACCCTTAGTGCTA
AACAGCTACGTTACACCTATTTGCATTGCTGACAAGGAATACACGAACATCTTCCTC
AAATTTGGATCTGGCTATGTAAGTGGCTGGGGAAGAGTCTTCCACAAAGGGAGATC
AGCTTTAGTTCTTCAGTACCTTAGAGTTCCACTTGTTGACCGAGCCACATGTCTTCTA
TCTACAAAGTTCACCATCTATAACAACATGTTCTGTGCTGGCTTCCATGAAGGAGGT
AGAGATTCATGTCAAGGAGATAGTGGGGGACCCCATGTTACTGAAGTGGAAGGGAC
CAGTTTCTTAACTGGAATTATTAGCTGGGGTGAAGAGTGTGCAATGAAAGGCAAAT
ATGGAATATATACCAAGGTATCCCGGTATGTCAACTGGATTAAGGAAAAAACAAAG
CTCACTTAACCTCGACTGTGCCTTCTAGTTGCCAGCCATCTGTTGTTTGCCCCTCCCC
CGTGCCTTCCTTGACCCTGGAAGGTGCCACTCCCACTGTCCTTTCCTAATAAAATGA
GGAAATTGCATCGCATTGTCTGAGTAGGTGTCATTCTATTCTGGGGGGTGGGGTGGG
GCAGGACAGCAAGGGGGAGGATTGGGAAGACAATAGCAGGCATGCTGGGGATGCG
GTGGGCTCTATGGCTTCTGAGGCGGAAAGAACCAGCTGGGGCTCTAGGGGGTATCC
CCGTGAGATCGCCCATCGGTATAATGATTTGGGAGAACAACATTTCAAAGGCCTGTA
AGTTATAATGCTGAAAGCCCACTTAATATTTCTGGTAGTATTAGTTAAAGTTTTAAA
ACACCTTTTTCCACCTTGAGTGTGAGAATTGTAGAGCAGTGCTGTCCAGTAGAAATG
TGTGCATTGACAGAAAGACTGTGGATCTGTGCTGAGCAATGTGGCAGCCAGAGATC
ACAAGGCTATCAAGCACTTTGCACATGGCAAGTGTAACTGAGAAGCACACATTCAA
ATAATAGTTAATTTTAATTGAATGTATCTAGCCATGTGTGGCTAGTAGCTCCTTTCCT
GGAGAGAGAATCTGGAGCCCACATCTAACTTGTTAAGTCTGGAATCTTATTTTTTAT
TTCTGGAAAGGTCTATGAACTATAGTTTTGGGGGCAGCTCACTTACTAACTTTTAAT
GCAATAAGAATCTCATGGTATCTTGAGAACATTATTTTGTCTCTTTGTAGATCTAGGA
ACCCCTAGTGATGGAGTTGGCCACTCCCTCTCTGCGCGCTCGCTCGCTCACTGAGGC
CGCCCGGGCAAAGCCCGGGCGTCGGGCGACCTTTGGTCGCCCGGCCTCAGTGAGCG
AGCGAGCGCGCAGAGAGGGAGTGGCCAA
P00354 full sequence (from ITR to ITR): (SEQ ID NO: 284)
TTGGCCACTCCCTCTCTGCGCGCTCGCTCGCTCACTGAGGCCGGGCGACCAAAGGTC
GCCCGACGCCCGGGCTTTGCCCGGGCGGCCTCAGTGAGCGAGCGAGCGCGCAGAGA
GGGAGTGGCCAACTCCATCACTAGGGGTTCCTAGATCTTAGCCTCTGGCAAAATGAA
GTGGGTAACCTTTCTCCTCCTCCTCTTCGTCTCCGGCTCTGCTTTTTCCAGGGGTGTGT
TTCGCCGAGAAGCACGTAAGAGTTTTATGTTTTTTCATCTCTGCTTGTATTTTTCTAG
TAATGGAAGCCTGGTATTTTAAAATAGTTAAATTTTCCTTTAGTGCTGATTTCTAGAT
TATTATTACTGTTGTTGTTGTTATTATTGTCATTATTTGCATCTGAGAACCCTTAGGTG
GTTATATTATTGATATATTTTTGGTATCTTTGATGACAATAATGGGGGATTTTGAAAG
CTTAGCTTTAAATTTCTTTTAATTAAAAAAAAATGCTAGGCAGAATGACTCAAATTA
CGTTGGATACAGTTGAATTTATTACGGTCTCATAGGGCCTGCCTGCTCGACCATGCT
ATACTAAAAATTAAAAGTGTGTGTTACTAATTTTATAAATGGAGTTTCCATTTATATT
TACCTTTATTTCTTATTTACCATTGTCTTAGTAGATATTTACAAACATGACAGAAACA
CTAAATCTTGAGTTTGAATGCACAGATATAAACACTTAACGGGTTTTAAAAATAATA
ATGTTGGTGAAAAAATATAACTTTGAGTGTAGCAGAGAGGAACCATTGCCACCTTCA
GATTTTCCTGTAACGATCGGGAACTGGCATCTTCAGGGAGTAGCTTAGGTCAGTGAA
GAGAAGAACAAAAAGCAGCATATTACAGTTAGTTGTCTTCATCAATCTTTAAATATG
TTGTGTGGTTTTTCTCTCCCTGTTTCCACAGTTTTTCTTGATCATGAAAACGCCAACA
AAATTCTGAATCGGCCAAAGAGGTATAATTCAGGTAAATTGGAAGAGTTTGTTCAA
GGGAACCTTGAGAGAGAATGTATGGAAGAAAAGTGTAGTTTTGAAGAAGCACGAGA
AGTTTTTGAAAACACTGAAAGAACAACTGAATTTTGGAAGCAGTATGTTGATGGAG
ATCAGTGTGAGTCCAATCCATGTTTAAATGGCGGCAGTTGCAAGGATGACATTAATT
CCTATGAATGTTGGTGTCCCTTTGGATTTGAAGGAAAGAACTGTGAATTAGATGTAA
CATGTAACATTAAGAATGGCAGATGCGAGCAGTTTTGTAAAAATAGTGCTGATAAC
AAGGTGGTTTGCTCCTGTACTGAGGGATATCGACTTGCAGAAAACCAGAAGTCCTGT
GAACCAGCAGTGCCATTTCCATGTGGAAGAGTTTCTGTTTCACAAACTTCTAAGCTC
ACCCGTGCTGAGACTGTTTTTCCTGATGTGGACTATGTAAATTCTACTGAAGCTGAA
ACCATTTTGGATAACATCACTCAAAGCACCCAATCATTTAATGACTTCACTCGGGTT
GTTGGTGGAGAAGATGCCAAACCAGGTCAATTCCCTTGGCAGGTTGTTTTGAATGGT
AAAGTTGATGCATTCTGTGGAGGCTCTATCGTTAATGAAAAATGGATTGTAACTGCT
GCCCACTGTGTTGAAACTGGTGTTAAAATTACAGTTGTCGCAGGTGAACATAATATT
GAGGAGACAGAACATACAGAGCAAAAGCGAAATGTGATTCGAATTATTCCTCACCA
CAACTACAATGCAGCTATTAATAAGTACAACCATGACATTGCCCTTCTGGAACTGGA
CGAACCCTTAGTGCTAAACAGCTACGTTACACCTATTTGCATTGCTGACAAGGAATA
CACGAACATCTTCCTCAAATTTGGATCTGGCTATGTAAGTGGCTGGGGAAGAGTCTT
CCACAAAGGGAGATCAGCTTTAGTTCTTCAGTACCTTAGAGTTCCACTTGTTGACCG
AGCCACATGTCTTCTATCTACAAAGTTCACCATCTATAACAACATGTTCTGTGCTGGC
TTCCATGAAGGAGGTAGAGATTCATGTCAAGGAGATAGTGGGGGACCCCATGTTAC
TGAAGTGGAAGGGACCAGTTTCTTAACTGGAATTATTAGCTGGGGTGAAGAGTGTG
CAATGAAAGGCAAATATGGAATATATACCAAGGTATCCCGGTATGTCAACTGGATT
AAGGAAAAAACAAAGCTCACTTAACCTCGACTGTGCCTTCTAGTTGCCAGCCATCTG
TTGTTTGCCCCTCCCCCGTGCCTTCCTTGACCCTGGAAGGTGCCACTCCCACTGTCCT
TTCCTAATAAAATGAGGAAATTGCATCGCATTGTCTGAGTAGGTGTCATTCTATTCT
GGGGGGTGGGGTGGGGCAGGACAGCAAGGGGGAGGATTGGGAAGACAATAGCAGG
CATGCTGGGGATGCGGTGGGCTCTATGGCTTCTGAGGCGGAAAGAACCAGCTGGGG
CTCTAGGGGGTATCCCCGTGAGATCGCCCATCGGTATAATGATTTGGGAGAACAACA
TTTCAAAGGCCTGTAAGTTATAATGCTGAAAGCCCACTTAATATTTCTGGTAGTATT
AGTTAAAGTTTTAAAACACCTTTTTCCACCTTGAGTGTGAGAATTGTAGAGCAGTGC
TGTCCAGTAGAAATGTGTGCATTGACAGAAAGACTGTGGATCTGTGCTGAGCAATGT
GGCAGCCAGAGATCACAAGGCTATCAAGCACTTTGCACATGGCAAGTGTAACTGAG
AAGCACACATTCAAATAATAGTTAATTTTAATTGAATGTATCTAGCCATGTGTGGCT
AGTAGCTCCTTTCCTGGAGAGAGAATCTGGAGCCCACATCTAACTTGTTAAGTCTGG
AATCTTATTTTTTATTTCTGGAAAGGTCTATGAACTATAGTTTTGGGGGCAGCTCACT
TACTAACTTTTAATGCAATAAGAATCTCATGGTATCTTGAGAACATTATTTTGTCTCT
TTGTAGTACTGAAACCTTATACATGTGAAGTAAGGGGTCTATACTTAAGTCACATCT
CCAACCTTAGTAATGTTTTAATGTAGTAAAAAAATGAGTAATTAATTTATTTTTAGA
AGGTCAATAGTATCATGTATTCCAAATAACAGAGGTATATGGTTAGAAAAGAAACA
ATTCAAAGGACTTATATAATATCTAGCCTTGACAATGAATAAATTTAGAGAGTAGTT
TGCCTGTTTGCCTCATGTTCATAAATCTATTGACACATATGTGCATCTGCACTTCAGC
ATGGTAGAAGTCCATATTCAGATCTAGGAACCCCTAGTGATGGAGTTGGCCACTCCC
TCTCTGCGCGCTCGCTCGCTCACTGAGGCCGCCCGGGCAAAGCCCGGGCGTCGGGC
GACCTTTGGTCGCCCGGCCTCAGTGAGCGAGCGAGCGCGCAGAGAGGGAGTGGCCA
A
P00350: The 300/600 bp HA F9 construct (for G551) (SEQ ID NO: 285)
TTGGCCACTCCCTCTCTGCGCGCTCGCTCGCTCACTGAGGCCGGGCGACCAAAGGTC
GCCCGACGCCCGGGCTTTGCCCGGGCGGCCTCAGTGAGCGAGCGAGCGCGCAGAGA
GGGAGTGGCCAACTCCATCACTAGGGGTTCCTAGATCTAAGTATATTAGAGCGAGTC
TTTCTGCACACAGATCACCTTTCCTATCAACCCCACTAGCCTCTGGCAAAATGAAGT
GGGTAACCTTTCTCCTCCTCCTCTTCGTCTCCGGCTCTGCTTTTTCCAGGGGTGTGTTT
CGCCGAGAAGCACGTAAGAGTTTTATGTTTTTTCATCTCTGCTTGTATTTTTCTAGTA
ATGGAAGCCTGGTATTTTAAAATAGTTAAATTTTCCTTTAGTGCTGATTTCTAGATTA
TTATTACTGTTGTTGTTGTTATTATTGTCATTATTTGCATCTGAGAACCTTTTTCTTGA
TCATGAAAACGCCAACAAAATTCTGAATCGGCCAAAGAGGTATAATTCAGGTAAAT
TGGAAGAGTTTGTTCAAGGGAACCTTGAGAGAGAATGTATGGAAGAAAAGTGTAGT
TTTGAAGAAGCACGAGAAGTTTTTGAAAACACTGAAAGAACAACTGAATTTTGGAA
GCAGTATGTTGATGGAGATCAGTGTGAGTCCAATCCATGTTTAAATGGCGGCAGTTG
CAAGGATGACATTAATTCCTATGAATGTTGGTGTCCCTTTGGATTTGAAGGAAAGAA
CTGTGAATTAGATGTAACATGTAACATTAAGAATGGCAGATGCGAGCAGTTTTGTAA
AAATAGTGCTGATAACAAGGTGGTTTGCTCCTGTACTGAGGGATATCGACTTGCAGA
AAACCAGAAGTCCTGTGAACCAGCAGTGCCATTTCCATGTGGAAGAGTTTCTGTTTC
ACAAACTTCTAAGCTCACCCGTGCTGAGACTGTTTTTCCTGATGTGGACTATGTAAA
TTCTACTGAAGCTGAAACCATTTTGGATAACATCACTCAAAGCACCCAATCATTTAA
TGACTTCACTCGGGTTGTTGGTGGAGAAGATGCCAAACCAGGTCAATTCCCTTGGCA
GGTTGTTTTGAATGGTAAAGTTGATGCATTCTGTGGAGGCTCTATCGTTAATGAAAA
ATGGATTGTAACTGCTGCCCACTGTGTTGAAACTGGTGTTAAAATTACAGTTGTCGC
AGGTGAACATAATATTGAGGAGACAGAACATACAGAGCAAAAGCGAAATGTGATTC
GAATTATTCCTCACCACAACTACAATGCAGCTATTAATAAGTACAACCATGACATTG
CCCTTCTGGAACTGGACGAACCCTTAGTGCTAAACAGCTACGTTACACCTATTTGCA
TTGCTGACAAGGAATACACGAACATCTTCCTCAAATTTGGATCTGGCTATGTAAGTG
GCTGGGGAAGAGTCTTCCACAAAGGGAGATCAGCTTTAGTTCTTCAGTACCTTAGAG
TTCCACTTGTTGACCGAGCCACATGTCTTCTATCTACAAAGTTCACCATCTATAACAA
CATGTTCTGTGCTGGCTTCCATGAAGGAGGTAGAGATTCATGTCAAGGAGATAGTGG
GGGACCCCATGTTACTGAAGTGGAAGGGACCAGTTTCTTAACTGGAATTATTAGCTG
GGGTGAAGAGTGTGCAATGAAAGGCAAATATGGAATATATACCAAGGTATCCCGGT
ATGTCAACTGGATTAAGGAAAAAACAAAGCTCACTTAACCTCGACTGTGCCTTCTAG
TTGCCAGCCATCTGTTGTTTGCCCCTCCCCCGTGCCTTCCTTGACCCTGGAAGGTGCC
ACTCCCACTGTCCTTTCCTAATAAAATGAGGAAATTGCATCGCATTGTCTGAGTAGG
TGTCATTCTATTCTGGGGGGTGGGGTGGGGCAGGACAGCAAGGGGGAGGATTGGGA
AGACAATAGCAGGCATGCTGGGGATGCGGTGGGCTCTATGGCTTCTGAGGCGGAAA
GAACCAGCTGGGGCTCTAGGGGGTATCCCCCTTAGGTGGTTATATTATTGATATATT
TTTGGTATCTTTGATGACAATAATGGGGGATTTTGAAAGCTTAGCTTTAAATTTCTTT
TAATTAAAAAAAAATGCTAGGCAGAATGACTCAAATTACGTTGGATACAGTTGAAT
TTATTACGGTCTCATAGGGCCTGCCTGCTCGACCATGCTATACTAAAAATTAAAAGT
GTGTGTTACTAATTTTATAAATGGAGTTTCCATTTATATTTACCTTTATTTCTTATTTA
CCATTGTCTTAGTAGATATTTACAAACATGACAGAAACACTAAAGATCTAGGAACCC
CTAGTGATGGAGTTGGCCACTCCCTCTCTGCGCGCTCGCTCGCTCACTGAGGCCGCC
CGGGCAAAGCCCGGGCGTCGGGCGACCTTTGGTCGCCCGGCCTCAGTGAGCGAGCG
AGCGCGCAGAGAGGGAGTGGCCAA
P00356: The 300/2000 bp HA F9 construct (for G551) (SEQ ID NO: 286)
TTGGCCACTCCCTCTCTGCGCGCTCGCTCGCTCACTGAGGCCGGGCGACCAAAGGTC
GCCCGACGCCCGGGCTTTGCCCGGGCGGCCTCAGTGAGCGAGCGAGCGCGCAGAGA
GGGAGTGGCCAACTCCATCACTAGGGGTTCCTAGATCTAAGTATATTAGAGCGAGTC
TTTCTGCACACAGATCACCTTTCCTATCAACCCCACTAGCCTCTGGCAAAATGAAGT
GGGTAACCTTTCTCCTCCTCCTCTTCGTCTCCGGCTCTGCTTTTTCCAGGGGTGTGTTT
CGCCGAGAAGCACGTAAGAGTTTTATGTTTTTTCATCTCTGCTTGTATTTTTCTAGTA
ATGGAAGCCTGGTATTTTAAAATAGTTAAATTTTCCTTTAGTGCTGATTTCTAGATTA
TTATTACTGTTGTTGTTGTTATTATTGTCATTATTTGCATCTGAGAACCTTTTTCTTGA
TCATGAAAACGCCAACAAAATTCTGAATCGGCCAAAGAGGTATAATTCAGGTAAAT
TGGAAGAGTTTGTTCAAGGGAACCTTGAGAGAGAATGTATGGAAGAAAAGTGTAGT
TTTGAAGAAGCACGAGAAGTTTTTGAAAACACTGAAAGAACAACTGAATTTTGGAA
GCAGTATGTTGATGGAGATCAGTGTGAGTCCAATCCATGTTTAAATGGCGGCAGTTG
CAAGGATGACATTAATTCCTATGAATGTTGGTGTCCCTTTGGATTTGAAGGAAAGAA
CTGTGAATTAGATGTAACATGTAACATTAAGAATGGCAGATGCGAGCAGTTTTGTAA
AAATAGTGCTGATAACAAGGTGGTTTGCTCCTGTACTGAGGGATATCGACTTGCAGA
AAACCAGAAGTCCTGTGAACCAGCAGTGCCATTTCCATGTGGAAGAGTTTCTGTTTC
ACAAACTTCTAAGCTCACCCGTGCTGAGACTGTTTTTCCTGATGTGGACTATGTAAA
TTCTACTGAAGCTGAAACCATTTTGGATAACATCACTCAAAGCACCCAATCATTTAA
TGACTTCACTCGGGTTGTTGGTGGAGAAGATGCCAAACCAGGTCAATTCCCTTGGCA
GGTTGTTTTGAATGGTAAAGTTGATGCATTCTGTGGAGGCTCTATCGTTAATGAAAA
ATGGATTGTAACTGCTGCCCACTGTGTTGAAACTGGTGTTAAAATTACAGTTGTCGC
AGGTGAACATAATATTGAGGAGACAGAACATACAGAGCAAAAGCGAAATGTGATTC
GAATTATTCCTCACCACAACTACAATGCAGCTATTAATAAGTACAACCATGACATTG
CCCTTCTGGAACTGGACGAACCCTTAGTGCTAAACAGCTACGTTACACCTATTTGCA
TTGCTGACAAGGAATACACGAACATCTTCCTCAAATTTGGATCTGGCTATGTAAGTG
GCTGGGGAAGAGTCTTCCACAAAGGGAGATCAGCTTTAGTTCTTCAGTACCTTAGAG
TTCCACTTGTTGACCGAGCCACATGTCTTCTATCTACAAAGTTCACCATCTATAACAA
CATGTTCTGTGCTGGCTTCCATGAAGGAGGTAGAGATTCATGTCAAGGAGATAGTGG
GGGACCCCATGTTACTGAAGTGGAAGGGACCAGTTTCTTAACTGGAATTATTAGCTG
GGGTGAAGAGTGTGCAATGAAAGGCAAATATGGAATATATACCAAGGTATCCCGGT
ATGTCAACTGGATTAAGGAAAAAACAAAGCTCACTTAACCTCGACTGTGCCTTCTAG
TTGCCAGCCATCTGTTGTTTGCCCCTCCCCCGTGCCTTCCTTGACCCTGGAAGGTGCC
ACTCCCACTGTCCTTTCCTAATAAAATGAGGAAATTGCATCGCATTGTCTGAGTAGG
TGTCATTCTATTCTGGGGGGTGGGGTGGGGCAGGACAGCAAGGGGGAGGATTGGGA
AGACAATAGCAGGCATGCTGGGGATGCGGTGGGCTCTATGGCTTCTGAGGCGGAAA
GAACCAGCTGGGGCTCTAGGGGGTATCCCCCTTAGGTGGTTATATTATTGATATATT
TTTGGTATCTTTGATGACAATAATGGGGGATTTTGAAAGCTTAGCTTTAAATTTCTTT
TAATTAAAAAAAAATGCTAGGCAGAATGACTCAAATTACGTTGGATACAGTTGAAT
TTATTACGGTCTCATAGGGCCTGCCTGCTCGACCATGCTATACTAAAAATTAAAAGT
GTGTGTTACTAATTTTATAAATGGAGTTTCCATTTATATTTACCTTTATTTCTTATTTA
CCATTGTCTTAGTAGATATTTACAAACATGACAGAAACACTAAATCTTGAGTTTGAA
TGCACAGATATAAACACTTAACGGGTTTTAAAAATAATAATGTTGGTGAAAAAATAT
AACTTTGAGTGTAGCAGAGAGGAACCATTGCCACCTTCAGATTTTCCTGTAACGATC
GGGAACTGGCATCTTCAGGGAGTAGCTTAGGTCAGTGAAGAGAAGAACAAAAAGCA
GCATATTACAGTTAGTTGTCTTCATCAATCTTTAAATATGTTGTGTGGTTTTTCTCTCC
CTGTTTCCACAGACAAGAGTGAGATCGCCCATCGGTATAATGATTTGGGAGAACAA
CATTTCAAAGGCCTGTAAGTTATAATGCTGAAAGCCCACTTAATATTTCTGGTAGTA
TTAGTTAAAGTTTTAAAACACCTTTTTCCACCTTGAGTGTGAGAATTGTAGAGCAGT
GCTGTCCAGTAGAAATGTGTGCATTGACAGAAAGACTGTGGATCTGTGCTGAGCAAT
GTGGCAGCCAGAGATCACAAGGCTATCAAGCACTTTGCACATGGCAAGTGTAACTG
AGAAGCACACATTCAAATAATAGTTAATTTTAATTGAATGTATCTAGCCATGTGTGG
CTAGTAGCTCCTTTCCTGGAGAGAGAATCTGGAGCCCACATCTAACTTGTTAAGTCT
GGAATCTTATTTTTTATTTCTGGAAAGGTCTATGAACTATAGTTTTGGGGGCAGCTCA
CTTACTAACTTTTAATGCAATAAGATCCATGGTATCTTGAGAACATTATTTTGTCTCT
TTGTAGTACTGAAACCTTATACATGTGAAGTAAGGGGTCTATACTTAAGTCACATCT
CCAACCTTAGTAATGTTTTAATGTAGTAAAAAAATGAGTAATTAATTTATTTTTAGA
AGGTCAATAGTATCATGTATTCCAAATAACAGAGGTATATGGTTAGAAAAGAAACA
ATTCAAAGGACTTATATAATATCTAGCCTTGACAATGAATAAATTTAGAGAGTAGTT
TGCCTGTTTGCCTCATGTTCATAAATCTATTGACACATATGTGCATCTGCACTTCAGC
ATGGTAGAAGTCCATATTCCTTTGCTTGGAAAGGCAGGTGTTCCCATTACGCCTCAG
AGAATAGCTGACGGGAAGAGGCTTTCTAGATAGTTGTATGAAAGATATACAAAATC
TCGCAGGTATACACAGGCATGATTTGCTGGTTGGGAGAGCCACTTGCCTCATACTGA
GGTTTTTGTGTCTGCTTTTCAGAGTCCTGATTGCCTTTTCCCAGTATCTCCAGAAATG
CTCATACGATGAGCATGCCAAATTAGTGCAGGAAGTAACAGACTTTGCAAAGACGT
GTGTTGCCGATGAGTCTGCCGCCAACTGTGACAAATCCCTTGTGAGTACCTTCTGAT
TTTGTGGATCTACTTTCCTGCTTTCTGGAACTCTGTTTCAAAGCCAATCATGACTCCA
TCACTTAAGGCCCCGGGAACACTGTGGCAGAGGGCAGCAGAGAGATTGATAAAGCC
AGGGTGATGGGAATTTTCTGTGGGACTCCATTTCATAGTAATTGCAGAAGCTACAAT
ACACTCAAAAAGTCTCACCACATGACTGCCCAAATGGGAGCTTGACAGTGACAGTG
ACAGTAGATATGCCAAAGTGGATGAGGGAAAGACCACAAGAGCTAAACCCTGTAAA
AAGAACTGTAGGCAACTAAGGAATGCAGAGAGAAAGATCTAGGAACCCCTAGTGAT
GGAGTTGGCCACTCCCTCTCTGCGCGCTCGCTCGCTCACTGAGGCCGCCCGGGCAAA
GCCCGGGCGTCGGGCGACCTTTGGTCGCCCGGCCTCAGTGAGCGAGCGAGCGCGCA
GAGAGGGAGTGGCCAA
P00362: The 300/1500 bp HA F9 construct (for G551) (SEQ ID NO: 287)
TTGGCCACTCCCTCTCTGCGCGCTCGCTCGCTCACTGAGGCCGGGCGACCAAAGGTC
GCCCGACGCCCGGGCTTTGCCCGGGCGGCCTCAGTGAGCGAGCGAGCGCGCAGAGA
GGGAGTGGCCAACTCCATCACTAGGGGTTCCTAGATCTAAGTATATTAGAGCGAGTC
TTTCTGCACACAGATCACCTTTCCTATCAACCCCACTAGCCTCTGGCAAAATGAAGT
GGGTAACCTTTCTCCTCCTCCTCTTCGTCTCCGGCTCTGCTTTTTCCAGGGGTGTGTTT
CGCCGAGAAGCACGTAAGAGTTTTATGTTTTTTCATCTCTGCTTGTATTTTTCTAGTA
ATGGAAGCCTGGTATTTTAAAATAGTTAAATTTTCCTTTAGTGCTGATTTCTAGATTA
TTATTACTGTTGTTGTTGTTATTATTGTCATTATTTGCATCTGAGAACCTTTTTCTTGA
TCATGAAAACGCCAACAAAATTCTGAATCGGCCAAAGAGGTATAATTCAGGTAAAT
TGGAAGAGTTTGTTCAAGGGAACCTTGAGAGAGAATGTATGGAAGAAAAGTGTAGT
TTTGAAGAAGCACGAGAAGTTTTTGAAAACACTGAAAGAACAACTGAATTTTGGAA
GCAGTATGTTGATGGAGATCAGTGTGAGTCCAATCCATGTTTAAATGGCGGCAGTTG
CAAGGATGACATTAATTCCTATGAATGTTGGTGTCCCTTTGGATTTGAAGGAAAGAA
CTGTGAATTAGATGTAACATGTAACATTAAGAATGGCAGATGCGAGCAGTTTTGTAA
AAATAGTGCTGATAACAAGGTGGTTTGCTCCTGTACTGAGGGATATCGACTTGCAGA
AAACCAGAAGTCCTGTGAACCAGCAGTGCCATTTCCATGTGGAAGAGTTTCTGTTTC
ACAAACTTCTAAGCTCACCCGTGCTGAGACTGTTTTTCCTGATGTGGACTATGTAAA
TTCTACTGAAGCTGAAACCATTTTGGATAACATCACTCAAAGCACCCAATCATTTAA
TGACTTCACTCGGGTTGTTGGTGGAGAAGATGCCAAACCAGGTCAATTCCCTTGGCA
GGTTGTTTTGAATGGTAAAGTTGATGCATTCTGTGGAGGCTCTATCGTTAATGAAAA
ATGGATTGTAACTGCTGCCCACTGTGTTGAAACTGGTGTTAAAATTACAGTTGTCGC
AGGTGAACATAATATTGAGGAGACAGAACATACAGAGCAAAAGCGAAATGTGATTC
GAATTATTCCTCACCACAACTACAATGCAGCTATTAATAAGTACAACCATGACATTG
CCCTTCTGGAACTGGACGAACCCTTAGTGCTAAACAGCTACGTTACACCTATTTGCA
TTGCTGACAAGGAATACACGAACATCTTCCTCAAATTTGGATCTGGCTATGTAAGTG
GCTGGGGAAGAGTCTTCCACAAAGGGAGATCAGCTTTAGTTCTTCAGTACCTTAGAG
TTCCACTTGTTGACCGAGCCACATGTCTTCTATCTACAAAGTTCACCATCTATAACAA
CATGTTCTGTGCTGGCTTCCATGAAGGAGGTAGAGATTCATGTCAAGGAGATAGTGG
GGGACCCCATGTTACTGAAGTGGAAGGGACCAGTTTCTTAACTGGAATTATTAGCTG
GGGTGAAGAGTGTGCAATGAAAGGCAAATATGGAATATATACCAAGGTATCCCGGT
ATGTCAACTGGATTAAGGAAAAAACAAAGCTCACTTAACCTCGACTGTGCCTTCTAG
TTGCCAGCCATCTGTTGTTTGCCCCTCCCCCGTGCCTTCCTTGACCCTGGAAGGTGCC
ACTCCCACTGTCCTTTCCTAATAAAATGAGGAAATTGCATCGCATTGTCTGAGTAGG
TGTCATTCTATTCTGGGGGGTGGGGTGGGGCAGGACAGCAAGGGGGAGGATTGGGA
AGACAATAGCAGGCATGCTGGGGATGCGGTGGGCTCTATGGCTTCTGAGGCGGAAA
GAACCAGCTGGGGCTCTAGGGGGTATCCCCCTTAGGTGGTTATATTATTGATATATT
TTTGGTATCTTTGATGACAATAATGGGGGATTTTGAAAGCTTAGCTTTAAATTTCTTT
TAATTAAAAAAAAATGCTAGGCAGAATGACTCAAATTACGTTGGATACAGTTGAAT
TTATTACGGTCTCATAGGGCCTGCCTGCTCGACCATGCTATACTAAAAATTAAAAGT
GTGTGTTACTAATTTTATAAATGGAGTTTCCATTTATATTTACCTTTATTTCTTATTTA
CCATTGTCTTAGTAGATATTTACAAACATGACAGAAACACTAAATCTTGAGTTTGAA
TGCACAGATATAAACACTTAACGGGTTTTAAAAATAATAATGTTGGTGAAAAAATAT
AACTTTGAGTGTAGCAGAGAGGAACCATTGCCACCTTCAGATTTTCCTGTAACGATC
GGGAACTGGCATCTTCAGGGAGTAGCTTAGGTCAGTGAAGAGAAGAACAAAAAGCA
GCATATTACAGTTAGTTGTCTTCATCAATCTTTAAATATGTTGTGTGGTTTTTCTCTCC
CTGTTTCCACAGACAAGAGTGAGATCGCCCATCGGTATAATGATTTGGGAGAACAA
CATTTCAAAGGCCTGTAAGTTATAATGCTGAAAGCCCACTTAATATTTCTGGTAGTA
TTAGTTAAAGTTTTAAAACACCTTTTTCCACCTTGAGTGTGAGAATTGTAGAGCAGT
GCTGTCCAGTAGAAATGTGTGCATTGACAGAAAGACTGTGGATCTGTGCTGAGCAAT
GTGGCAGCCAGAGATCACAAGGCTATCAAGCACTTTGCACATGGCAAGTGTAACTG
AGAAGCACACATTCAAATAATAGTTAATTTTAATTGAATGTATCTAGCCATGTGTGG
CTAGTAGCTCCTTTCCTGGAGAGAGAATCTGGAGCCCACATCTAACTTGTTAAGTCT
GGAATCTTATTTTTTATTTCTGGAAAGGTCTATGAACTATAGTTTTGGGGGCAGCTCA
CTTACTAACTTTTAATGCAATAAGATCCATGGTATCTTGAGAACATTATTTTGTCTCT
TTGTAGTACTGAAACCTTATACATGTGAAGTAAGGGGTCTATACTTAAGTCACATCT
CCAACCTTAGTAATGTTTTAATGTAGTAAAAAAATGAGTAATTAATTTATTTTTAGA
AGGTCAATAGTATCATGTATTCCAAATAACAGAGGTATATGGTTAGAAAAGAAACA
ATTCAAAGGACTTATATAATATCTAGCCTTGACAATGAATAAATTTAGAGAGTAGTT
TGCCTGTTTGCCTCATGTTCATAAATCTATTGACACATATGTGCATCTGCACTTCAGC
ATGGTAGAAGTCCATATTCCTTTGCTTGGAAAGGCAGGTGTTCCCATTACGCCTCAG
AGAATAGCTGACGGGAAGAGGCTTTCTAGATAGTTGTATGAAAGATATACAAAATC
TCGCAGGTATACACAGGCATGATTTGCTGGTTGGGAGAGCCACTTAGATCTAGGAAC
CCCTAGTGATGGAGTTGGCCACTCCCTCTCTGCGCGCTCGCTCGCTCACTGAGGCCG
CCCGGGCAAAGCCCGGGCGTCGGGCGACCTTTGGTCGCCCGGCCTCAGTGAGCGAG
CGAGCGCGCAGAGAGGGAGTGGCCAA
Cas9 ORF (SEQ ID NO: 703)
ATGGATAAGAAGTACTCAATCGGGCTGGATATCGGAACTAATTCCGTGGGTTGGGC
AGTGATCACGGATGAATACAAAGTGCCGTCCAAGAAGTTCAAGGTCCTGGGGAACA
CCGATAGACACAGCATCAAGAAAAATCTCATCGGAGCCCTGCTGTTTGACTCCGGC
GAAACCGCAGAAGCGACCCGGCTCAAACGTACCGCGAGGCGACGCTACACCCGGCG
GAAGAATCGCATCTGCTATCTGCAAGAGATCTTTTCGAACGAAATGGCAAAGGTCG
ACGACAGCTTCTTCCACCGCCTGGAAGAATCTTTCCTGGTGGAGGAGGACAAGAAG
CATGAACGGCATCCTATCTTTGGAAACATCGTCGACGAAGTGGCGTACCACGAAAA
GTACCCGACCATCTACCATCTGCGGAAGAAGTTGGTTGACTCAACTGACAAGGCCG
ACCTCAGATTGATCTACTTGGCCCTCGCCCATATGATCAAATTCCGCGGACACTTCC
TGATCGAAGGCGATCTGAACCCTGATAACTCCGACGTGGATAAGCTTTTCATTCAAC
TGGTGCAGACCTACAACCAACTGTTCGAAGAAAACCCAATCAATGCTAGCGGCGTC
GATGCCAAGGCCATCCTGTCCGCCCGGCTGTCGAAGTCGCGGCGCCTCGAAAACCT
GATCGCACAGCTGCCGGGAGAGAAAAAGAACGGACTTTTCGGCAACTTGATCGCTC
TCTCACTGGGACTCACTCCCAATTTCAAGTCCAATTTTGACCTGGCCGAGGACGCGA
AGCTGCAACTCTCAAAGGACACCTACGACGACGACTTGGACAATTTGCTGGCACAA
ATTGGCGATCAGTACGCGGATCTGTTCCTTGCCGCTAAGAACCTTTCGGACGCAATC
TTGCTGTCCGATATCCTGCGCGTGAACACCGAAATAACCAAAGCGCCGCTTAGCGCC
TCGATGATTAAGCGGTACGACGAGCATCACCAGGATCTCACGCTGCTCAAAGCGCT
CGTGAGACAGCAACTGCCTGAAAAGTACAAGGAGATCTTCTTCGACCAGTCCAAGA
ATGGGTACGCAGGGTACATCGATGGAGGCGCTAGCCAGGAAGAGTTCTATAAGTTC
ATCAAGCCAATCCTGGAAAAGATGGACGGAACCGAAGAACTGCTGGTCAAGCTGAA
CAGGGAGGATCTGCTCCGGAAACAGAGAACCTTTGACAACGGATCCATTCCCCACC
AGATCCATCTGGGTGAGCTGCACGCCATCTTGCGGCGCCAGGAGGACTTTTACCCAT
TCCTCAAGGACAACCGGGAAAAGATCGAGAAAATTCTGACGTTCCGCATCCCGTATT
ACGTGGGCCCACTGGCGCGCGGCAATTCGCGCTTCGCGTGGATGACTAGAAAATCA
GAGGAAACCATCACTCCTTGGAATTTCGAGGAAGTTGTGGATAAGGGAGCTTCGGC
ACAAAGCTTCATCGAACGAATGACCAACTTCGACAAGAATCTCCCAAACGAGAAGG
TGCTTCCTAAGCACAGCCTCCTTTACGAATACTTCACTGTCTACAACGAACTGACTA
AAGTGAAATACGTTACTGAAGGAATGAGGAAGCCGGCCTTTCTGTCCGGAGAACAG
AAGAAAGCAATTGTCGATCTGCTGTTCAAGACCAACCGCAAGGTGACCGTCAAGCA
GCTTAAAGAGGACTACTTCAAGAAGATCGAGTGTTTCGACTCAGTGGAAATCAGCG
GGGTGGAGGACAGATTCAACGCTTCGCTGGGAACCTATCATGATCTCCTGAAGATCA
TCAAGGACAAGGACTTCCTTGACAACGAGGAGAACGAGGACATCCTGGAAGATATC
GTCCTGACCTTGACCCTTTTCGAGGATCGCGAGATGATCGAGGAGAGGCTTAAGACC
TACGCTCATCTCTTCGACGATAAGGTCATGAAACAACTCAAGCGCCGCCGGTACACT
GGTTGGGGCCGCCTCTCCCGCAAGCTGATCAACGGTATTCGCGATAAACAGAGCGG
TAAAACTATCCTGGATTTCCTCAAATCGGATGGCTTCGCTAATCGTAACTTCATGCA
ATTGATCCACGACGACAGCCTGACCTTTAAGGAGGACATCCAAAAAGCACAAGTGT
CCGGACAGGGAGACTCACTCCATGAACACATCGCGAATCTGGCCGGTTCGCCGGCG
ATTAAGAAGGGAATTCTGCAAACTGTGAAGGTGGTCGACGAGCTGGTGAAGGTCAT
GGGACGGCACAAACCGGAGAATATCGTGATTGAAATGGCCCGAGAAAACCAGACTA
CCCAGAAGGGCCAGAAAAACTCCCGCGAAAGGATGAAGCGGATCGAAGAAGGAAT
CAAGGAGCTGGGCAGCCAGATCCTGAAAGAGCACCCGGTGGAAAACACGCAGCTG
CAGAACGAGAAGCTCTACCTGTACTATTTGCAAAATGGACGGGACATGTACGTGGA
CCAAGAGCTGGACATCAATCGGTTGTCTGATTACGACGTGGACCACATCGTTCCACA
GTCCTTTCTGAAGGATGACTCGATCGATAACAAGGTGTTGACTCGCAGCGACAAGA
ACAGAGGGAAGTCAGATAATGTGCCATCGGAGGAGGTCGTGAAGAAGATGAAGAA
TTACTGGCGGCAGCTCCTGAATGCGAAGCTGATTACCCAGAGAAAGTTTGACAATCT
CACTAAAGCCGAGCGCGGCGGACTCTCAGAGCTGGATAAGGCTGGATTCATCAAAC
GGCAGCTGGTCGAGACTCGGCAGATTACCAAGCACGTGGCGCAGATCTTGGACTCC
CGCATGAACACTAAATACGACGAGAACGATAAGCTCATCCGGGAAGTGAAGGTGAT
TACCCTGAAAAGCAAACTTGTGTCGGACTTTCGGAAGGACTTTCAGTTTTACAAAGT
GAGAGAAATCAACAACTACCATCACGCGCATGACGCATACCTCAACGCTGTGGTCG
GTACCGCCCTGATCAAAAAGTACCCTAAACTTGAATCGGAGTTTGTGTACGGAGACT
ACAAGGTCTACGACGTGAGGAAGATGATAGCCAAGTCCGAACAGGAAATCGGGAA
AGCAACTGCGAAATACTTCTTTTACTCAAACATCATGAACTTTTTCAAGACTGAAAT
TACGCTGGCCAATGGAGAAATCAGGAAGAGGCCACTGATCGAAACTAACGGAGAA
ACGGGCGAAATCGTGTGGGACAAGGGCAGGGACTTCGCAACTGTTCGCAAAGTGCT
CTCTATGCCGCAAGTCAATATTGTGAAGAAAACCGAAGTGCAAACCGGCGGATTTTC
AAAGGAATCGATCCTCCCAAAGAGAAATAGCGACAAGCTCATTGCACGCAAGAAAG
ACTGGGACCCGAAGAAGTACGGAGGATTCGATTCGCCGACTGTCGCATACTCCGTC
CTCGTGGTGGCCAAGGTGGAGAAGGGAAAGAGCAAAAAGCTCAAATCCGTCAAAG
AGCTGCTGGGGATTACCATCATGGAACGATCCTCGTTCGAGAAGAACCCGATTGATT
TCCTCGAGGCGAAGGGTTACAAGGAGGTGAAGAAGGATCTGATCATCAAACTCCCC
AAGTACTCACTGTTCGAACTGGAAAATGGTCGGAAGCGCATGCTGGCTTCGGCCGG
AGAACTCCAAAAAGGAAATGAGCTGGCCTTGCCTAGCAAGTACGTCAACTTCCTCTA
TCTTGCTTCGCACTACGAAAAACTCAAAGGGTCACCGGAAGATAACGAACAGAAGC
AGCTTTTCGTGGAGCAGCACAAGCATTATCTGGATGAAATCATCGAACAAATCTCCG
AGTTTTCAAAGCGCGTGATCCTCGCCGACGCCAACCTCGACAAAGTCCTGTCGGCCT
ACAATAAGCATAGAGATAAGCCGATCAGAGAACAGGCCGAGAACATTATCCACTTG
TTCACCCTGACTAACCTGGGAGCCCCAGCCGCCTTCAAGTACTTCGATACTACTATC
GATCGCAAAAGATACACGTCCACCAAGGAAGTTCTGGACGCGACCCTGATCCACCA
AAGCATCACTGGACTCTACGAAACTAGGATCGATCTGTCGCAGCTGGGTGGCGAT
U-dep Cas9 ORF (SEQ ID NO: 704)
ATGGACAAGAAGTACAGCATCGGACTGGACATCGGAACAAACAGCGTCGGATGGGC
AGTCATCACAGACGAATACAAGGTCCCGAGCAAGAAGTTCAAGGTCCTGGGAAACA
CAGACAGACACAGCATCAAGAAGAACCTGATCGGAGCACTGCTGTTCGACAGCGGA
GAAACAGCAGAAGCAACAAGACTGAAGAGAACAGCAAGAAGAAGATACACAAGAA
GAAAGAACAGAATCTGCTACCTGCAGGAAATCTTCAGCAACGAAATGGCAAAGGTC
GACGACAGCTTCTTCCACAGACTGGAAGAAAGCTTCCTGGTCGAAGAAGACAAGAA
GCACGAAAGACACCCGATCTTCGGAAACATCGTCGACGAAGTCGCATACCACGAAA
AGTACCCGACAATCTACCACCTGAGAAAGAAGCTGGTCGACAGCACAGACAAGGCA
GACCTGAGACTGATCTACCTGGCACTGGCACACATGATCAAGTTCAGAGGACACTTC
CTGATCGAAGGAGACCTGAACCCGGACAACAGCGACGTCGACAAGCTGTTCATCCA
GCTGGTCCAGACATACAACCAGCTGTTCGAAGAAAACCCGATCAACGCAAGCGGAG
TCGACGCAAAGGCAATCCTGAGCGCAAGACTGAGCAAGAGCAGAAGACTGGAAAA
CCTGATCGCACAGCTGCCGGGAGAAAAGAAGAACGGACTGTTCGGAAACCTGATCG
CACTGAGCCTGGGACTGACACCGAACTTCAAGAGCAACTTCGACCTGGCAGAAGAC
GCAAAGCTGCAGCTGAGCAAGGACACATACGACGACGACCTGGACAACCTGCTGGC
ACAGATCGGAGACCAGTACGCAGACCTGTTCCTGGCAGCAAAGAACCTGAGCGACG
CAATCCTGCTGAGCGACATCCTGAGAGTCAACACAGAAATCACAAAGGCACCGCTG
AGCGCAAGCATGATCAAGAGATACGACGAACACCACCAGGACCTGACACTGCTGAA
GGCACTGGTCAGACAGCAGCTGCCGGAAAAGTACAAGGAAATCTTCTTCGACCAGA
GCAAGAACGGATACGCAGGATACATCGACGGAGGAGCAAGCCAGGAAGAATTCTA
CAAGTTCATCAAGCCGATCCTGGAAAAGATGGACGGAACAGAAGAACTGCTGGTCA
AGCTGAACAGAGAAGACCTGCTGAGAAAGCAGAGAACATTCGACAACGGAAGCAT
CCCGCACCAGATCCACCTGGGAGAACTGCACGCAATCCTGAGAAGACAGGAAGACT
TCTACCCGTTCCTGAAGGACAACAGAGAAAAGATCGAAAAGATCCTGACATTCAGA
ATCCCGTACTACGTCGGACCGCTGGCAAGAGGAAACAGCAGATTCGCATGGATGAC
AAGAAAGAGCGAAGAAACAATCACACCGTGGAACTTCGAAGAAGTCGTCGACAAG
GGAGCAAGCGCACAGAGCTTCATCGAAAGAATGACAAACTTCGACAAGAACCTGCC
GAACGAAAAGGTCCTGCCGAAGCACAGCCTGCTGTACGAATACTTCACAGTCTACA
ACGAACTGACAAAGGTCAAGTACGTCACAGAAGGAATGAGAAAGCCGGCATTCCTG
AGCGGAGAACAGAAGAAGGCAATCGTCGACCTGCTGTTCAAGACAAACAGAAAGG
TCACAGTCAAGCAGCTGAAGGAAGACTACTTCAAGAAGATCGAATGCTTCGACAGC
GTCGAAATCAGCGGAGTCGAAGACAGATTCAACGCAAGCCTGGGAACATACCACGA
CCTGCTGAAGATCATCAAGGACAAGGACTTCCTGGACAACGAAGAAAACGAAGACA
TCCTGGAAGACATCGTCCTGACACTGACACTGTTCGAAGACAGAGAAATGATCGAA
GAAAGACTGAAGACATACGCACACCTGTTCGACGACAAGGTCATGAAGCAGCTGAA
GAGAAGAAGATACACAGGATGGGGAAGACTGAGCAGAAAGCTGATCAACGGAATC
AGAGACAAGCAGAGCGGAAAGACAATCCTGGACTTCCTGAAGAGCGACGGATTCGC
AAACAGAAACTTCATGCAGCTGATCCACGACGACAGCCTGACATTCAAGGAAGACA
TCCAGAAGGCACAGGTCAGCGGACAGGGAGACAGCCTGCACGAACACATCGCAAA
CCTGGCAGGAAGCCCGGCAATCAAGAAGGGAATCCTGCAGACAGTCAAGGTCGTCG
ACGAACTGGTCAAGGTCATGGGAAGACACAAGCCGGAAAACATCGTCATCGAAATG
GCAAGAGAAAACCAGACAACACAGAAGGGACAGAAGAACAGCAGAGAAAGAATG
AAGAGAATCGAAGAAGGAATCAAGGAACTGGGAAGCCAGATCCTGAAGGAACACC
CGGTCGAAAACACACAGCTGCAGAACGAAAAGCTGTACCTGTACTACCTGCAGAAC
GGAAGAGACATGTACGTCGACCAGGAACTGGACATCAACAGACTGAGCGACTACGA
CGTCGACCACATCGTCCCGCAGAGCTTCCTGAAGGACGACAGCATCGACAACAAGG
TCCTGACAAGAAGCGACAAGAACAGAGGAAAGAGCGACAACGTCCCGAGCGAAGA
AGTCGTCAAGAAGATGAAGAACTACTGGAGACAGCTGCTGAACGCAAAGCTGATCA
CACAGAGAAAGTTCGACAACCTGACAAAGGCAGAGAGAGGAGGACTGAGCGAACT
GGACAAGGCAGGATTCATCAAGAGACAGCTGGTCGAAACAAGACAGATCACAAAG
CACGTCGCACAGATCCTGGACAGCAGAATGAACACAAAGTACGACGAAAACGACA
AGCTGATCAGAGAAGTCAAGGTCATCACACTGAAGAGCAAGCTGGTCAGCGACTTC
AGAAAGGACTTCCAGTTCTACAAGGTCAGAGAAATCAACAACTACCACCACGCACA
CGACGCATACCTGAACGCAGTCGTCGGAACAGCACTGATCAAGAAGTACCCGAAGC
TGGAAAGCGAATTCGTCTACGGAGACTACAAGGTCTACGACGTCAGAAAGATGATC
GCAAAGAGCGAACAGGAAATCGGAAAGGCAACAGCAAAGTACTTCTTCTACAGCAA
CATCATGAACTTCTTCAAGACAGAAATCACACTGGCAAACGGAGAAATCAGAAAGA
GACCGCTGATCGAAACAAACGGAGAAACAGGAGAAATCGTCTGGGACAAGGGAAG
AGACTTCGCAACAGTCAGAAAGGTCCTGAGCATGCCGCAGGTCAACATCGTCAAGA
AGACAGAAGTCCAGACAGGAGGATTCAGCAAGGAAAGCATCCTGCCGAAGAGAAA
CAGCGACAAGCTGATCGCAAGAAAGAAGGACTGGGACCCGAAGAAGTACGGAGGA
TTCGACAGCCCGACAGTCGCATACAGCGTCCTGGTCGTCGCAAAGGTCGAAAAGGG
AAAGAGCAAGAAGCTGAAGAGCGTCAAGGAACTGCTGGGAATCACAATCATGGAA
AGAAGCAGCTTCGAAAAGAACCCGATCGACTTCCTGGAAGCAAAGGGATACAAGGA
AGTCAAGAAGGACCTGATCATCAAGCTGCCGAAGTACAGCCTGTTCGAACTGGAAA
ACGGAAGAAAGAGAATGCTGGCAAGCGCAGGAGAACTGCAGAAGGGAAACGAACT
GGCACTGCCGAGCAAGTACGTCAACTTCCTGTACCTGGCAAGCCACTACGAAAAGC
TGAAGGGAAGCCCGGAAGACAACGAACAGAAGCAGCTGTTCGTCGAACAGCACAA
GCACTACCTGGACGAAATCATCGAACAGATCAGCGAATTCAGCAAGAGAGTCATCC
TGGCAGACGCAAACCTGGACAAGGTCCTGAGCGCATACAACAAGCACAGAGACAA
GCCGATCAGAGAACAGGCAGAAAACATCATCCACCTGTTCACACTGACAAACCTGG
GAGCACCGGCAGCATTCAAGTACTTCGACACAACAATCGACAGAAAGAGATACACA
AGCACAAAGGAAGTCCTGGACGCAACACTGATCCACCAGAGCATCACAGGACTGTA
CGAAACAAGAATCGACCTGAGCCAGCTGGGAGGAGACGGAGGAGGAAGCCCGAAG
AAGAAGAGAAAGGTCTAG
mRNA comprising U dep Cas9 (SEQ ID NO: 705)
GGGUCCCGCAGUCGGCGUCCAGCGGCUCUGCUUGUUCGUGUGUGUGUCGUUGCAG
GCCUUAUUCGGAUCCGCCACCAUGGACAAGAAGUACAGCAUCGGACUGGACAUCG
GAACAAACAGCGUCGGAUGGGCAGUCAUCACAGACGAAUACAAGGUCCCGAGCAA
GAAGUUCAAGGUCCUGGGAAACACAGACAGACACAGCAUCAAGAAGAACCUGAU
CGGAGCACUGCUGUUCGACAGCGGAGAAACAGCAGAAGCAACAAGACUGAAGAG
AACAGCAAGAAGAAGAUACACAAGAAGAAAGAACAGAAUCUGCUACCUGCAGGA
AAUCUUCAGCAACGAAAUGGCAAAGGUCGACGACAGCUUCUUCCACAGACUGGAA
GAAAGCUUCCUGGUCGAAGAAGACAAGAAGCACGAAAGACACCCGAUCUUCGGA
AACAUCGUCGACGAAGUCGCAUACCACGAAAAGUACCCGACAAUCUACCACCUGA
GAAAGAAGCUGGUCGACAGCACAGACAAGGCAGACCUGAGACUGAUCUACCUGGC
ACUGGCACACAUGAUCAAGUUCAGAGGACACUUCCUGAUCGAAGGAGACCUGAAC
CCGGACAACAGCGACGUCGACAAGCUGUUCAUCCAGCUGGUCCAGACAUACAACC
AGCUGUUCGAAGAAAACCCGAUCAACGCAAGCGGAGUCGACGCAAAGGCAAUCCU
GAGCGCAAGACUGAGCAAGAGCAGAAGACUGGAAAACCUGAUCGCACAGCUGCCG
GGAGAAAAGAAGAACGGACUGUUCGGAAACCUGAUCGCACUGAGCCUGGGACUG
ACACCGAACUUCAAGAGCAACUUCGACCUGGCAGAAGACGCAAAGCUGCAGCUGA
GCAAGGACACAUACGACGACGACCUGGACAACCUGCUGGCACAGAUCGGAGACCA
GUACGCAGACCUGUUCCUGGCAGCAAAGAACCUGAGCGACGCAAUCCUGCUGAGC
GACAUCCUGAGAGUCAACACAGAAAUCACAAAGGCACCGCUGAGCGCAAGCAUGA
UCAAGAGAUACGACGAACACCACCAGGACCUGACACUGCUGAAGGCACUGGUCAG
ACAGCAGCUGCCGGAAAAGUACAAGGAAAUCUUCUUCGACCAGAGCAAGAACGG
AUACGCAGGAUACAUCGACGGAGGAGCAAGCCAGGAAGAAUUCUACAAGUUCAU
CAAGCCGAUCCUGGAAAAGAUGGACGGAACAGAAGAACUGCUGGUCAAGCUGAA
CAGAGAAGACCUGCUGAGAAAGCAGAGAACAUUCGACAACGGAAGCAUCCCGCAC
CAGAUCCACCUGGGAGAACUGCACGCAAUCCUGAGAAGACAGGAAGACUUCUACC
CGUUCCUGAAGGACAACAGAGAAAAGAUCGAAAAGAUCCUGACAUUCAGAAUCC
CGUACUACGUCGGACCGCUGGCAAGAGGAAACAGCAGAUUCGCAUGGAUGACAA
GAAAGAGCGAAGAAACAAUCACACCGUGGAACUUCGAAGAAGUCGUCGACAAGG
GAGCAAGCGCACAGAGCUUCAUCGAAAGAAUGACAAACUUCGACAAGAACCUGCC
GAACGAAAAGGUCCUGCCGAAGCACAGCCUGCUGUACGAAUACUUCACAGUCUAC
AACGAACUGACAAAGGUCAAGUACGUCACAGAAGGAAUGAGAAAGCCGGCAUUC
CUGAGCGGAGAACAGAAGAAGGCAAUCGUCGACCUGCUGUUCAAGACAAACAGA
AAGGUCACAGUCAAGCAGCUGAAGGAAGACUACUUCAAGAAGAUCGAAUGCUUC
GACAGCGUCGAAAUCAGCGGAGUCGAAGACAGAUUCAACGCAAGCCUGGGAACA
UACCACGACCUGCUGAAGAUCAUCAAGGACAAGGACUUCCUGGACAACGAAGAAA
ACGAAGACAUCCUGGAAGACAUCGUCCUGACACUGACACUGUUCGAAGACAGAGA
AAUGAUCGAAGAAAGACUGAAGACAUACGCACACCUGUUCGACGACAAGGUCAU
GAAGCAGCUGAAGAGAAGAAGAUACACAGGAUGGGGAAGACUGAGCAGAAAGCU
GAUCAACGGAAUCAGAGACAAGCAGAGCGGAAAGACAAUCCUGGACUUCCUGAA
GAGCGACGGAUUCGCAAACAGAAACUUCAUGCAGCUGAUCCACGACGACAGCCUG
ACAUUCAAGGAAGACAUCCAGAAGGCACAGGUCAGCGGACAGGGAGACAGCCUGC
ACGAACACAUCGCAAACCUGGCAGGAAGCCCGGCAAUCAAGAAGGGAAUCCUGCA
GACAGUCAAGGUCGUCGACGAACUGGUCAAGGUCAUGGGAAGACACAAGCCGGA
AAACAUCGUCAUCGAAAUGGCAAGAGAAAACCAGACAACACAGAAGGGACAGAA
GAACAGCAGAGAAAGAAUGAAGAGAAUCGAAGAAGGAAUCAAGGAACUGGGAAG
CCAGAUCCUGAAGGAACACCCGGUCGAAAACACACAGCUGCAGAACGAAAAGCUG
UACCUGUACUACCUGCAGAACGGAAGAGACAUGUACGUCGACCAGGAACUGGACA
UCAACAGACUGAGCGACUACGACGUCGACCACAUCGUCCCGCAGAGCUUCCUGAA
GGACGACAGCAUCGACAACAAGGUCCUGACAAGAAGCGACAAGAACAGAGGAAA
GAGCGACAACGUCCCGAGCGAAGAAGUCGUCAAGAAGAUGAAGAACUACUGGAG
ACAGCUGCUGAACGCAAAGCUGAUCACACAGAGAAAGUUCGACAACCUGACAAAG
GCAGAGAGAGGAGGACUGAGCGAACUGGACAAGGCAGGAUUCAUCAAGAGACAG
CUGGUCGAAACAAGACAGAUCACAAAGCACGUCGCACAGAUCCUGGACAGCAGAA
UGAACACAAAGUACGACGAAAACGACAAGCUGAUCAGAGAAGUCAAGGUCAUCA
CACUGAAGAGCAAGCUGGUCAGCGACUUCAGAAAGGACUUCCAGUUCUACAAGG
UCAGAGAAAUCAACAACUACCACCACGCACACGACGCAUACCUGAACGCAGUCGU
CGGAACAGCACUGAUCAAGAAGUACCCGAAGCUGGAAAGCGAAUUCGUCUACGG
AGACUACAAGGUCUACGACGUCAGAAAGAUGAUCGCAAAGAGCGAACAGGAAAU
CGGAAAGGCAACAGCAAAGUACUUCUUCUACAGCAACAUCAUGAACUUCUUCAAG
ACAGAAAUCACACUGGCAAACGGAGAAAUCAGAAAGAGACCGCUGAUCGAAACA
AACGGAGAAACAGGAGAAAUCGUCUGGGACAAGGGAAGAGACUUCGCAACAGUC
AGAAAGGUCCUGAGCAUGCCGCAGGUCAACAUCGUCAAGAAGACAGAAGUCCAG
ACAGGAGGAUUCAGCAAGGAAAGCAUCCUGCCGAAGAGAAACAGCGACAAGCUG
AUCGCAAGAAAGAAGGACUGGGACCCGAAGAAGUACGGAGGAUUCGACAGCCCG
ACAGUCGCAUACAGCGUCCUGGUCGUCGCAAAGGUCGAAAAGGGAAAGAGCAAG
AAGCUGAAGAGCGUCAAGGAACUGCUGGGAAUCACAAUCAUGGAAAGAAGCAGC
UUCGAAAAGAACCCGAUCGACUUCCUGGAAGCAAAGGGAUACAAGGAAGUCAAG
AAGGACCUGAUCAUCAAGCUGCCGAAGUACAGCCUGUUCGAACUGGAAAACGGA
AGAAAGAGAAUGCUGGCAAGCGCAGGAGAACUGCAGAAGGGAAACGAACUGGCA
CUGCCGAGCAAGUACGUCAACUUCCUGUACCUGGCAAGCCACUACGAAAAGCUGA
AGGGAAGCCCGGAAGACAACGAACAGAAGCAGCUGUUCGUCGAACAGCACAAGCA
CUACCUGGACGAAAUCAUCGAACAGAUCAGCGAAUUCAGCAAGAGAGUCAUCCUG
GCAGACGCAAACCUGGACAAGGUCCUGAGCGCAUACAACAAGCACAGAGACAAGC
CGAUCAGAGAACAGGCAGAAAACAUCAUCCACCUGUUCACACUGACAAACCUGGG
AGCACCGGCAGCAUUCAAGUACUUCGACACAACAAUCGACAGAAAGAGAUACACA
AGCACAAAGGAAGUCCUGGACGCAACACUGAUCCACCAGAGCAUCACAGGACUGU
ACGAAACAAGAAUCGACCUGAGCCAGCUGGGAGGAGACGGAGGAGGAAGCCCGA
AGAAGAAGAGAAAGGUCUAGCUAGCCAUCACAUUUAAAAGCAUCUCAGCCUACC
AUGAGAAUAAGAGAAAGAAAAUGAAGAUCAAUAGCUUAUUCAUCUCUUUUUCUU
UUUCGUUGGUGUAAAGCCAACACCCUGUCUAAAAAACAUAAAUUUCUUUAAUCA
UUUUGCCUCUUUUCUCUGUGCUUCAAUUAAUAAAAAAUGGAAAGAACCUCGAGA
AAAAAAAAAAAAAAAAAAAAAAAAAAAAAAAAAAAAAAAAAAAAAAAAAAAAAA
AAAAAAAAAAAAAAAAAAAAAAAAAAAAAAAAAAA

The application's sequence listing, which the Patent Office published only in electronic form, follows.

SEQUENCE LISTING (1138 sequences)

SEQ ID NO: 1 - DNA, 709 bp, Homo sapiens
  source 1..709: mol_type = genomic DNA
gtaagaaatccatttttctattgttcaacttttattctattttcccagtaaaataaagttttagtaaactctgcatctttaaagaattattttggcatttatttctaaaatggcatagtattttgtatttgtgaagtcttacaaggttatcttattaataaaattcaaacatcctaggtaaaaaaaaaaaaaggtcagaattgtttagtgactgtaattttcttttgcgcactaaggaaagtgcaaagtaacttagagtgactgaaacttcacagaatagggttgaagattgaattcataactatcccaaagacctatccattgcactatgctttatttaaaaaccacaaaacctgtgctgttgatctcataaatagaacttgtatttatatttattttcattttagtctgtcttcttggttgctgttgatagacactaaaagagtattagatattatctaagtttgaatataaggctataaatatttaataatttttaaaatagtattcttggtaattgaattattcttctgtttaaaggcagaagaaataattgaacatcatcctgagtttttctgtaggaatcagagcccaatattttgaaacaaatgcataatctaagtcaaatggaaagaaatataaaaagtaacattattacttcttgttttcttcagtatttaacaatccttttttttcttcccttgcccag

SEQ ID NO: 2 - RNA, 20 nt, synthetic construct
  source 1..20: mol_type = other RNA; note = Description of Artificial Sequence: Synthetic oligonucleotide
gagcaacctcactcttgtct

SEQ ID NO: 3 - RNA, 20 nt, synthetic construct
  source 1..20: mol_type = other RNA; note = Description of Artificial Sequence: Synthetic oligonucleotide
atgcatttgtttcaaaatat

SEQ ID NO: 4 - RNA, 20 nt, synthetic construct
  source 1..20: mol_type = other RNA; note = Description of Artificial Sequence: Synthetic oligonucleotide
tgcatttgtttcaaaatatt

SEQ ID NO: 5 - RNA, 20 nt, synthetic construct
  source 1..20: mol_type = other RNA; note = Description of Artificial Sequence: Synthetic oligonucleotide
atttatgagatcaacagcac

SEQ ID NO: 6 - RNA, 20 nt, synthetic construct
  source 1..20: mol_type = other RNA; note = Description of Artificial Sequence: Synthetic oligonucleotide
gatcaacagcacaggttttg

SEQ ID NO: 7 - RNA, 20 nt, synthetic construct
  source 1..20: mol_type = other RNA; note = Description of Artificial Sequence: Synthetic oligonucleotide
ttaaataaagcatagtgcaa

SEQ ID NO: 8 - RNA, 20 nt, synthetic construct
  source 1..20: mol_type = other RNA; note = Description of Artificial Sequence: Synthetic oligonucleotide
taaagcatagtgcaatggat

SEQ ID NO: 9 - RNA, 20 nt, synthetic construct
  source 1..20: mol_type = other RNA; note = Description of Artificial Sequence: Synthetic oligonucleotide
tagtgcaatggataggtctt

SEQ ID NO: 10 - RNA, 20 nt, synthetic construct
  source 1..20: mol_type = other RNA; note = Description of Artificial Sequence: Synthetic oligonucleotide
tactaaaactttattttact

SEQ ID NO: 11 - RNA, 20 nt, synthetic construct
  source 1..20: mol_type = other RNA; note = Description of Artificial Sequence: Synthetic oligonucleotide
aaagttgaacaatagaaaaa

SEQ ID NO: 12 - RNA, 20 nt, synthetic construct
  source 1..20: mol_type = other RNA; note = Description of Artificial Sequence: Synthetic oligonucleotide
aatgcataatctaagtcaaa

SEQ ID NO: 13 - RNA, 20 nt, synthetic construct
  source 1..20: mol_type = other RNA; note = Description of Artificial Sequence: Synthetic oligonucleotide
taataaaattcaaacatcct

SEQ ID NO: 14 - RNA, 20 nt, synthetic construct
  source 1..20: mol_type = other RNA; note = Description of Artificial Sequence: Synthetic oligonucleotide
gcatctttaaagaattattt

SEQ ID NO: 15 - RNA, 20 nt, synthetic construct
  source 1..20: mol_type = other RNA; note = Description of Artificial Sequence: Synthetic oligonucleotide
tttggcatttatttctaaaa

SEQ ID NO: 16 - RNA, 20 nt, synthetic construct
  source 1..20: mol_type = other RNA; note = Description of Artificial Sequence: Synthetic oligonucleotide
tgtatttgtgaagtcttaca

SEQ ID NO: 17 - RNA, 20 nt, synthetic construct
  source 1..20: mol_type = other RNA; note = Description of Artificial Sequence: Synthetic oligonucleotide
tcctaggtaaaaaaaaaaaa

SEQ ID NO: 18 - RNA, 20 nt, synthetic construct
  source 1..20: mol_type = other RNA; note = Description of Artificial Sequence: Synthetic oligonucleotide
taattttcttttgcgcacta

SEQ ID NO: 19 - RNA, 20 nt, synthetic construct
  source 1..20: mol_type = other RNA; note = Description of Artificial Sequence: Synthetic oligonucleotide
tgactgaaacttcacagaat

SEQ ID NO: 20 - RNA, 20 nt, synthetic construct
  source 1..20: mol_type = other RNA; note = Description of Artificial Sequence: Synthetic oligonucleotide
gactgaaacttcacagaata

SEQ ID NO: 21 - RNA, 20 nt, synthetic construct
  source 1..20: mol_type = other RNA; note = Description of Artificial Sequence: Synthetic oligonucleotide
ttcattttagtctgtcttct

SEQ ID NO: 22 - RNA, 20 nt, synthetic construct
  source 1..20: mol_type = other RNA; note = Description of Artificial Sequence: Synthetic oligonucleotide
attatctaagtttgaatata

SEQ ID NO: 23 - RNA, 20 nt, synthetic construct
  source 1..20: mol_type = other RNA; note = Description of Artificial Sequence: Synthetic oligonucleotide
aatttttaaaatagtattct

SEQ ID NO: 24 - RNA, 20 nt, synthetic construct
  source 1..20: mol_type = other RNA; note = Description of Artificial Sequence: Synthetic oligonucleotide
tgaattattcttctgtttaa

SEQ ID NO: 25 - RNA, 20 nt, synthetic construct
  source 1..20: mol_type = other RNA; note = Description of Artificial Sequence: Synthetic oligonucleotide
atcatcctgagtttttctgt

SEQ ID NO: 26 - RNA, 20 nt, synthetic construct
  source 1..20: mol_type = other RNA; note = Description of Artificial Sequence: Synthetic oligonucleotide
ttactaaaactttattttac

SEQ ID NO: 27 - RNA, 20 nt, synthetic construct
  source 1..20: mol_type = other RNA; note = Description of Artificial Sequence: Synthetic oligonucleotide
acctttttttttttttacct

SEQ ID NO: 28 - RNA, 20 nt, synthetic construct
  source 1..20: mol_type = other RNA; note = Description of Artificial Sequence: Synthetic oligonucleotide
agtgcaatggataggtcttt

SEQ ID NO: 29 - RNA, 20 nt, synthetic construct
  source 1..20: mol_type = other RNA; note = Description of Artificial Sequence: Synthetic oligonucleotide
tgattcctacagaaaaactc

SEQ ID NO: 30 - RNA, 20 nt, synthetic construct
  source 1..20: mol_type = other RNA; note = Description of Artificial Sequence: Synthetic oligonucleotide
tgggcaagggaagaaaaaaa

SEQ ID NO: 31 - RNA, 20 nt, synthetic construct
  source 1..20: mol_type = other RNA; note = Description of Artificial Sequence: Synthetic oligonucleotide
cctcactcttgtctgggcaa

SEQ ID NO: 32 - RNA, 20 nt, synthetic construct
  source 1..20: mol_type = other RNA; note = Description of Artificial Sequence: Synthetic oligonucleotide
acctcactcttgtctgggca

SEQ ID NO: 33 - RNA, 20 nt, synthetic construct
  source 1..20: mol_type = other RNA; note = Description of Artificial Sequence: Synthetic oligonucleotide
tgagcaacctcactcttgtc

SEQ ID NO: 34 - RNA, 100 nt, synthetic construct
  source 1..100: mol_type = other RNA; note = Description of Artificial Sequence: Synthetic polynucleotide
gagcaacctcactcttgtctgttttagagctagaaatagcaagttaaaataaggctagtccgttatcaacttgaaaaagtggcaccgagtcggtgctttt

SEQ ID NO: 35 - RNA, 100 nt, synthetic construct
  source 1..100: mol_type = other RNA; note = Description of Artificial Sequence: Synthetic polynucleotide
atgcatttgtttcaaaatatgttttagagctagaaatagcaagttaaaataaggctagtccgttatcaacttgaaaaagtggcaccgagtcggtgctttt

SEQ ID NO: 36 - RNA, 100 nt, synthetic construct
  source 1..100: mol_type = other RNA; note = Description of Artificial Sequence: Synthetic polynucleotide
tgcatttgtttcaaaatattgttttagagctagaaatagcaagttaaaataaggctagtccgttatcaacttgaaaaagtggcaccgagtcggtgctttt

SEQ ID NO: 37 - RNA, 100 nt, synthetic construct
  source 1..100: mol_type = other RNA; note = Description of Artificial Sequence: Synthetic polynucleotide
atttatgagatcaacagcacgttttagagctagaaatagcaagttaaaataaggctagtccgttatcaacttgaaaaagtggcaccgagtcggtgctttt

SEQ ID NO: 38 - RNA, 100 nt, synthetic construct
  source 1..100: mol_type = other RNA; note = Description of Artificial Sequence: Synthetic polynucleotide
gatcaacagcacaggttttggttttagagctagaaatagcaagttaaaataaggctagtccgttatcaacttgaaaaagtggcaccgagtcggtgctttt

SEQ ID NO: 39 - RNA, 100 nt, synthetic construct
  source 1..100: mol_type = other RNA; note = Description of Artificial Sequence: Synthetic polynucleotide
ttaaataaagcatagtgcaagttttagagctagaaatagcaagttaaaataaggctagtccgttatcaacttgaaaaagtggcaccgagtcggtgctttt

SEQ ID NO: 40 - RNA, 100 nt, synthetic construct
  source 1..100: mol_type = other RNA; note = Description of Artificial Sequence: Synthetic polynucleotide
taaagcatagtgcaatggatgttttagagctagaaatagcaagttaaaataaggctagtccgttatcaacttgaaaaagtggcaccgagtcggtgctttt

SEQ ID NO: 41 - RNA, 100 nt, synthetic construct
  source 1..100: mol_type = other RNA; note = Description of Artificial Sequence: Synthetic polynucleotide
tagtgcaatggataggtcttgttttagagctagaaatagcaagttaaaataaggctagtccgttatcaacttgaaaaagtggcaccgagtcggtgctttt

SEQ ID NO: 42 - RNA, 100 nt, synthetic construct
  source 1..100: mol_type = other RNA; note = Description of Artificial Sequence: Synthetic polynucleotide
tactaaaactttattttactgttttagagctagaaatagcaagttaaaataaggctagtccgttatcaacttgaaaaagtggcaccgagtcggtgctttt

SEQ ID NO: 43 - RNA, 100 nt, synthetic construct
  source 1..100: mol_type = other RNA; note = Description of Artificial Sequence: Synthetic polynucleotide
aaagttgaacaatagaaaaagttttagagctagaaatagcaagttaaaataaggctagtccgttatcaacttgaaaaagtggcaccgagtcggtgctttt

SEQ ID NO: 44 - RNA, 100 nt, synthetic construct
  source 1..100: mol_type = other RNA; note = Description of Artificial Sequence: Synthetic polynucleotide
aatgcataatctaagtcaaagttttagagctagaaatagcaagttaaaataaggctagtccgttatcaacttgaaaaagtggcaccgagtcggtgctttt

SEQ ID NO: 45 - RNA, 100 nt, synthetic construct
  source 1..100: mol_type = other RNA; note = Description of Artificial Sequence: Synthetic polynucleotide
taataaaattcaaacatcctgttttagagctagaaatagcaagttaaaataaggctagtccgttatcaacttgaaaaagtggcaccgagtcggtgctttt

SEQ ID NO: 46 - RNA, 100 nt, synthetic construct
  source 1..100: mol_type = other RNA; note = Description of Artificial Sequence: Synthetic polynucleotide
gcatctttaaagaattatttgttttagagctagaaatagcaagttaaaataaggctagtccgttatcaacttgaaaaagtggcaccgagtcggtgctttt

SEQ ID NO: 47 - RNA, 100 nt, synthetic construct
  source 1..100: mol_type = other RNA; note = Description of Artificial Sequence: Synthetic polynucleotide
tttggcatttatttctaaaagttttagagctagaaatagcaagttaaaataaggctagtccgttatcaacttgaaaaagtggcaccgagtcggtgctttt

SEQ ID NO: 48 - RNA, 100 nt, synthetic construct
  source 1..100: mol_type = other RNA; note = Description of Artificial Sequence: Synthetic polynucleotide
tgtatttgtgaagtcttacagttttagagctagaaatagcaagttaaaataaggctagtccgttatcaacttgaaaaagtggcaccgagtcggtgctttt

SEQ ID NO: 49 - RNA, 100 nt, synthetic construct
  source 1..100: mol_type = other RNA; note = Description of Artificial Sequence: Synthetic polynucleotide
tcctaggtaaaaaaaaaaaagttttagagctagaaatagcaagttaaaataaggctagtccgttatcaacttgaaaaagtggcaccgagtcggtgctttt

SEQ ID NO: 50 - RNA, 100 nt, synthetic construct
  source 1..100: mol_type = other RNA; note = Description of Artificial Sequence: Synthetic polynucleotide
taattttcttttgcgcactagttttagagctagaaatagcaagttaaaataaggctagtccgttatcaacttgaaaaagtggcaccgagtcggtgctttt

SEQ ID NO: 51 - RNA, 100 nt, synthetic construct
  source 1..100: mol_type = other RNA; note = Description of Artificial Sequence: Synthetic polynucleotide
tgactgaaacttcacagaatgttttagagctagaaatagcaagttaaaataaggctagtccgttatcaacttgaaaaagtggcaccgagtcggtgctttt

SEQ ID NO: 52 - RNA, 100 nt, synthetic construct
  source 1..100: mol_type = other RNA; note = Description of Artificial Sequence: Synthetic polynucleotide
gactgaaacttcacagaatagttttagagctagaaatagcaagttaaaataaggctagtccgttatcaacttgaaaaagtggcaccgagtcggtgctttt

SEQ ID NO: 53 - RNA, 100 nt, synthetic construct
  source 1..100: mol_type = other RNA; note = Description of Artificial Sequence: Synthetic polynucleotide
ttcattttagtctgtcttctgttttagagctagaaatagcaagttaaaataaggctagtccgttatcaacttgaaaaagtggcaccgagtcggtgctttt

SEQ ID NO: 54 - RNA, 100 nt, synthetic construct
  source 1..100: mol_type = other RNA; note = Description of Artificial Sequence: Synthetic polynucleotide
attatctaagtttgaatatagttttagagctagaaatagcaagttaaaataaggctagtccgttatcaacttgaaaaagtggcaccgagtcggtgctttt

SEQ ID NO: 55 - RNA, 100 nt, synthetic construct
  source 1..100: mol_type = other RNA; note = Description of Artificial Sequence: Synthetic polynucleotide
aatttttaaaatagtattctgttttagagctagaaatagcaagttaaaataaggctagtccgttatcaacttgaaaaagtggcaccgagtcggtgctttt

SEQ ID NO: 56 - RNA, 100 nt, synthetic construct
  source 1..100: mol_type = other RNA; note = Description of Artificial Sequence: Synthetic polynucleotide
tgaattattcttctgtttaagttttagagctagaaatagcaagttaaaataaggctagtccgttatcaacttgaaaaagtggcaccgagtcggtgctttt

SEQ ID NO: 57 - RNA, 100 nt, synthetic construct
  source 1..100: mol_type = other RNA; note = Description of Artificial Sequence: Synthetic polynucleotide
atcatcctgagtttttctgtgttttagagctagaaatagcaagttaaaataaggctagtccgttatcaacttgaaaaagtggcaccgagtcggtgctttt

SEQ ID NO: 58 - RNA, 100 nt, synthetic construct
  source 1..100: mol_type = other RNA; note = Description of Artificial Sequence: Synthetic polynucleotide
ttactaaaactttattttacgttttagagctagaaatagcaagttaaaataaggctagtccgttatcaacttgaaaaagtggcaccgagtcggtgctttt

SEQ ID NO: 59 - RNA, 100 nt, synthetic construct
  source 1..100: mol_type = other RNA; note = Description of Artificial Sequence: Synthetic polynucleotide
acctttttttttttttacctgttttagagctagaaatagcaagttaaaataaggctagtccgttatcaacttgaaaaagtggcaccgagtcggtgctttt

SEQ ID NO: 60 - RNA, 100 nt, synthetic construct
  source 1..100: mol_type = other RNA; note = Description of Artificial Sequence: Synthetic polynucleotide
agtgcaatggataggtctttgttttagagctagaaatagcaagttaaaataaggctagtccgttatcaacttgaaaaagtggcaccgagtcggtgctttt

SEQ ID NO: 61 - RNA, 100 nt, synthetic construct
  source 1..100: mol_type = other RNA; note = Description of Artificial Sequence: Synthetic polynucleotide
tgattcctacagaaaaactcgttttagagctagaaatagcaagttaaaataaggctagtccgttatcaacttgaaaaagtggcaccgagtcggtgctttt

SEQ ID NO: 62 - RNA, 100 nt, synthetic construct
  source 1..100: mol_type = other RNA; note = Description of Artificial Sequence: Synthetic polynucleotide
tgggcaagggaagaaaaaaagttttagagctagaaatagcaagttaaaataaggctagtccgttatcaacttgaaaaagtggcaccgagtcggtgctttt

SEQ ID NO: 63 - RNA, 100 nt, synthetic construct
  source 1..100: mol_type = other RNA; note = Description of Artificial Sequence: Synthetic polynucleotide
cctcactcttgtctgggcaagttttagagctagaaatagcaagttaaaataaggctagtccgttatcaacttgaaaaagtggcaccgagtcggtgctttt

SEQ ID NO: 64 - RNA, 100 nt, synthetic construct
  source 1..100: mol_type = other RNA; note = Description of Artificial Sequence: Synthetic polynucleotide
acctcactcttgtctgggcagttttagagctagaaatagcaagttaaaataaggctagtccgttatcaacttgaaaaagtggcaccgagtcggtgctttt

SEQ ID NO: 65 - RNA, 100 nt, synthetic construct
  source 1..100: mol_type = other RNA; note = Description of Artificial Sequence: Synthetic polynucleotide
tgagcaacctcactcttgtcgttttagagctagaaatagcaagttaaaataaggctagtccgttatcaacttgaaaaagtggcaccgagtcggtgctttt

SEQ ID NO: 66 - RNA, 100 nt, synthetic construct; identical to SEQ ID NO: 34
  source 1..100: mol_type = other RNA; note = Description of Artificial Sequence: Synthetic polynucleotide
  modified_base 1: mod_base = OTHER; note = 2'-O-methyl modified nucleotide with phosphorothioate linkage
  modified_base 2: mod_base = OTHER; note = 2'-O-methyl modified nucleotide with phosphorothioate linkage
  modified_base 3: mod_base = OTHER; note = 2'-O-methyl modified nucleotide with phosphorothioate linkage
  modified_base 29: mod_base = OTHER; note = 2'-O-methyl modified nucleotide
  modified_base 30: mod_base = OTHER; note = 2'-O-methyl modified nucleotide
  modified_base 31: mod_base = OTHER; note = 2'-O-methyl modified nucleotide
  modified_base 32: mod_base = OTHER; note = 2'-O-methyl modified nucleotide
  modified_base 33: mod_base = OTHER; note = 2'-O-methyl modified nucleotide
  modified_base 34: mod_base = OTHER; note = 2'-O-methyl modified nucleotide
  modified_base 35: mod_base = OTHER; note = 2'-O-methyl modified nucleotide
  modified_base 36: mod_base = OTHER; note = 2'-O-methyl modified nucleotide
  modified_base 37: mod_base = OTHER; note = 2'-O-methyl modified nucleotide
  modified_base 38: mod_base = OTHER; note = 2'-O-methyl modified nucleotide
  modified_base 39: mod_base = OTHER; note = 2'-O-methyl modified nucleotide
  modified_base 40: mod_base = OTHER; note = 2'-O-methyl modified nucleotide
  modified_base 69: mod_base = OTHER; note = 2'-O-methyl modified nucleotide
  modified_base 70: mod_base = OTHER; note = 2'-O-methyl modified nucleotide
  modified_base 71: mod_base = OTHER; note = 2'-O-methyl modified nucleotide
  modified_base 72: mod_base = OTHER; note = 2'-O-methyl modified nucleotide
  modified_base 73: mod_base = OTHER; note = 2'-O-methyl modified nucleotide
  modified_base 74: mod_base = OTHER; note = 2'-O-methyl modified nucleotide
  modified_base 75: mod_base = OTHER; note = 2'-O-methyl modified nucleotide
  modified_base 76: mod_base = OTHER; note = 2'-O-methyl modified nucleotide
  modified_base 77: mod_base = OTHER; note = 2'-O-methyl modified nucleotide
  modified_base 78: mod_base = OTHER; note = 2'-O-methyl modified nucleotide
  modified_base 79: mod_base = OTHER; note = 2'-O-methyl modified nucleotide
  modified_base 80: mod_base = OTHER; note = 2'-O-methyl modified nucleotide
  modified_base 81: mod_base = OTHER; note = 2'-O-methyl modified nucleotide
  modified_base 82: mod_base = OTHER; note = 2'-O-methyl modified nucleotide
  modified_base 83: mod_base = OTHER; note = 2'-O-methyl modified nucleotide
  modified_base 84: mod_base = OTHER; note = 2'-O-methyl modified nucleotide
  modified_base 85: mod_base = OTHER; note = 2'-O-methyl modified nucleotide
  modified_base 86: mod_base = OTHER; note = 2'-O-methyl modified nucleotide
  modified_base 87: mod_base = OTHER; note = 2'-O-methyl modified nucleotide
  modified_base 88: mod_base = OTHER; note = 2'-O-methyl modified nucleotide
  modified_base 89: mod_base = OTHER; note = 2'-O-methyl modified nucleotide
  modified_base 90: mod_base = OTHER; note = 2'-O-methyl modified nucleotide
  modified_base 91: mod_base = OTHER; note = 2'-O-methyl modified nucleotide
  modified_base 92: mod_base = OTHER; note = 2'-O-methyl modified nucleotide
  modified_base 93: mod_base = OTHER; note = 2'-O-methyl modified nucleotide
  modified_base 94: mod_base = OTHER; note = 2'-O-methyl modified nucleotide
  modified_base 95: mod_base = OTHER; note = 2'-O-methyl modified nucleotide
  modified_base 96: mod_base = OTHER; note = 2'-O-methyl modified nucleotide
  modified_base 97: mod_base = OTHER; note = 2'-O-methyl modified nucleotide with phosphorothioate linkage
  modified_base 98: mod_base = OTHER; note = 2'-O-methyl modified nucleotide with phosphorothioate linkage
  modified_base 99: mod_base = OTHER; note = 2'-O-methyl modified nucleotide with phosphorothioate linkage
  modified_base 100: mod_base = OTHER; note = 2'-O-methyl modified nucleotide

SEQ ID NO: 67 - RNA, 100 nt, synthetic construct; identical to SEQ ID NO: 35
  source 1..100: mol_type = other RNA; note = Description of Artificial Sequence: Synthetic polynucleotide
  modified_base 1: mod_base = OTHER; note = 2'-O-methyl modified nucleotide with phosphorothioate linkage
  modified_base 2: mod_base = OTHER; note = 2'-O-methyl modified nucleotide with phosphorothioate linkage
  modified_base 3: mod_base = OTHER; note = 2'-O-methyl modified nucleotide with phosphorothioate linkage
  modified_base 29: mod_base = OTHER; note = 2'-O-methyl modified nucleotide
  modified_base 30: mod_base = OTHER; note = 2'-O-methyl modified nucleotide
  modified_base 31: mod_base = OTHER; note = 2'-O-methyl modified nucleotide
  modified_base 32: mod_base = OTHER; note = 2'-O-methyl modified nucleotide
  modified_base 33: mod_base = OTHER; note = 2'-O-methyl modified nucleotide
  modified_base 34: mod_base = OTHER; note = 2'-O-methyl modified nucleotide
  modified_base 35: mod_base = OTHER; note = 2'-O-methyl modified nucleotide
  modified_base 36: mod_base = OTHER; note = 2'-O-methyl modified nucleotide
  modified_base 37: mod_base = OTHER; note = 2'-O-methyl modified nucleotide
  modified_base 38: mod_base = OTHER; note = 2'-O-methyl modified nucleotide
  modified_base 39: mod_base = OTHER; note = 2'-O-methyl modified nucleotide
  modified_base 40: mod_base = OTHER; note = 2'-O-methyl modified nucleotide
  modified_base 69: mod_base = OTHER; note = 2'-O-methyl modified nucleotide
  modified_base 70: mod_base = OTHER; note = 2'-O-methyl modified nucleotide
  modified_base 71: mod_base = OTHER; note = 2'-O-methyl modified nucleotide
  modified_base 72: mod_base = OTHER; note = 2'-O-methyl modified nucleotide
  modified_base 73: mod_base = OTHER; note = 2'-O-methyl modified nucleotide
  modified_base 74: mod_base = OTHER; note = 2'-O-methyl modified nucleotide
  modified_base 75: mod_base = OTHER; note = 2'-O-methyl modified nucleotide
  modified_base 76: mod_base = OTHER; note = 2'-O-methyl modified nucleotide
  modified_base 77: mod_base = OTHER; note = 2'-O-methyl modified nucleotide
  modified_base 78: mod_base = OTHER; note = 2'-O-methyl modified nucleotide
  modified_base 79: mod_base = OTHER; note = 2'-O-methyl modified nucleotide
  modified_base 80: mod_base = OTHER; note = 2'-O-methyl modified nucleotide
  modified_base 81: mod_base = OTHER; note = 2'-O-methyl modified nucleotide
  modified_base 82: mod_base = OTHER; note = 2'-O-methyl modified nucleotide
  modified_base 83: mod_base = OTHER; note = 2'-O-methyl modified nucleotide
  modified_base 84: mod_base = OTHER; note = 2'-O-methyl modified nucleotide
  modified_base 85: mod_base = OTHER; note = 2'-O-methyl modified nucleotide
  modified_base 86: mod_base = OTHER; note = 2'-O-methyl modified nucleotide
  modified_base 87: mod_base = OTHER; note = 2'-O-methyl modified nucleotide
  modified_base 88: mod_base = OTHER; note = 2'-O-methyl modified nucleotide
  modified_base 89: mod_base = OTHER; note = 2'-O-methyl modified nucleotide
  modified_base 90: mod_base = OTHER; note = 2'-O-methyl modified nucleotide
  modified_base 91: mod_base = OTHER; note = 2'-O-methyl modified nucleotide
  modified_base 92: mod_base = OTHER; note = 2'-O-methyl modified nucleotide
  modified_base 93: mod_base = OTHER; note = 2'-O-methyl modified nucleotide
  modified_base 94: mod_base = OTHER; note = 2'-O-methyl modified nucleotide
  modified_base 95: mod_base = OTHER; note = 2'-O-methyl modified nucleotide
  modified_base 96: mod_base = OTHER; note = 2'-O-methyl modified nucleotide
  modified_base 97: mod_base = OTHER; note = 2'-O-methyl modified nucleotide with phosphorothioate linkage
  modified_base 98: mod_base = OTHER; note = 2'-O-methyl modified nucleotide with phosphorothioate linkage
  modified_base 99: mod_base = OTHER; note = 2'-O-methyl modified nucleotide with phosphorothioate linkage
  modified_base 100: mod_base = OTHER; note = 2'-O-methyl modified nucleotide

SEQ ID NO: 68 - RNA, 100 nt, synthetic construct; identical to SEQ ID NO: 36
  source 1..100: mol_type = other RNA; note = Description of Artificial Sequence: Synthetic polynucleotide
  modified_base 1: mod_base = OTHER; note = 2'-O-methyl modified nucleotide with phosphorothioate linkage
  modified_base 2: mod_base = OTHER; note = 2'-O-methyl modified nucleotide with phosphorothioate linkage
  modified_base 3: mod_base = OTHER; note = 2'-O-methyl modified nucleotide with phosphorothioate linkage
  modified_base 29: mod_base = OTHER; note = 2'-O-methyl modified nucleotide
  modified_base 30: mod_base = OTHER; note = 2'-O-methyl modified nucleotide
  modified_base 31: mod_base = OTHER; note = 2'-O-methyl modified nucleotide
  modified_base 32: mod_base = OTHER; note = 2'-O-methyl modified nucleotide
  modified_base 33: mod_base = OTHER; note = 2'-O-methyl modified nucleotide
  modified_base 34: mod_base = OTHER; note = 2'-O-methyl modified nucleotide
  modified_base 35: mod_base = OTHER; note = 2'-O-methyl modified nucleotide
  modified_base 36: mod_base = OTHER; note = 2'-O-methyl modified nucleotide
  modified_base 37: mod_base = OTHER; note = 2'-O-methyl modified nucleotide
  modified_base 38: mod_base = OTHER; note = 2'-O-methyl modified nucleotide
  modified_base 39: mod_base = OTHER; note = 2'-O-methyl modified nucleotide
  modified_base 40: mod_base = OTHER; note = 2'-O-methyl modified nucleotide
  modified_base 69: mod_base = OTHER; note = 2'-O-methyl modified nucleotide
  modified_base 70: mod_base = OTHER; note = 2'-O-methyl modified nucleotide
  modified_base 71: mod_base = OTHER; note = 2'-O-methyl modified nucleotide
  modified_base 72: mod_base = OTHER; note = 2'-O-methyl modified nucleotide
  modified_base 73: mod_base = OTHER; note = 2'-O-methyl modified nucleotide
  modified_base 74: mod_base = OTHER; note = 2'-O-methyl modified nucleotide
  modified_base 75: mod_base = OTHER; note = 2'-O-methyl modified nucleotide
  modified_base 76: mod_base = OTHER; note = 2'-O-methyl modified nucleotide
  modified_base 77: mod_base = OTHER; note = 2'-O-methyl modified nucleotide
  modified_base 78: mod_base = OTHER; note = 2'-O-methyl modified nucleotide
  modified_base 79: mod_base = OTHER; note = 2'-O-methyl modified nucleotide
  modified_base 80: mod_base = OTHER; note = 2'-O-methyl modified nucleotide
  modified_base 81: mod_base = OTHER; note = 2'-O-methyl modified nucleotide
  modified_base 82: mod_base = OTHER; note = 2'-O-methyl modified nucleotide
  modified_base 83: mod_base = OTHER; note = 2'-O-methyl modified nucleotide
  modified_base 84: mod_base = OTHER; note = 2'-O-methyl modified nucleotide
  modified_base 85: mod_base = OTHER; note = 2'-O-methyl modified nucleotide
  modified_base 86: mod_base = OTHER; note = 2'-O-methyl modified nucleotide
  modified_base 87: mod_base = OTHER; note = 2'-O-methyl modified nucleotide
  modified_base 88: mod_base = OTHER; note = 2'-O-methyl modified nucleotide
  modified_base 89: mod_base = OTHER; note = 2'-O-methyl modified nucleotide
  modified_base 90: mod_base = OTHER; note = 2'-O-methyl modified nucleotide
  modified_base 91: mod_base = OTHER; note = 2'-O-methyl modified nucleotide
  modified_base 92: mod_base = OTHER; note = 2'-O-methyl modified nucleotide
  modified_base 93: mod_base = OTHER; note = 2'-O-methyl modified nucleotide
  modified_base 94: mod_base = OTHER; note = 2'-O-methyl modified nucleotide
  modified_base 95: mod_base = OTHER; note = 2'-O-methyl modified nucleotide
  modified_base 96: mod_base = OTHER; note = 2'-O-methyl modified nucleotide
  modified_base 97: mod_base = OTHER; note = 2'-O-methyl modified nucleotide with phosphorothioate linkage
  modified_base 98: mod_base = OTHER; note = 2'-O-methyl modified nucleotide with phosphorothioate linkage
  modified_base 99: mod_base = OTHER; note = 2'-O-methyl modified nucleotide with phosphorothioate linkage
  modified_base 100: mod_base = OTHER; note = 2'-O-methyl modified nucleotide

SEQ ID NO: 69 - RNA, 100 nt, synthetic construct; identical to SEQ ID NO: 37
  source 1..100: mol_type = other RNA; note = Description of Artificial Sequence: Synthetic polynucleotide
  modified_base 1: mod_base = OTHER; note = 2'-O-methyl modified nucleotide with phosphorothioate linkage
  modified_base 2: mod_base = OTHER; note = 2'-O-methyl modified nucleotide with phosphorothioate linkage
  modified_base 3: mod_base = OTHER; note = 2'-O-methyl modified nucleotide with phosphorothioate linkage
  modified_base 29: mod_base = OTHER; note = 2'-O-methyl modified nucleotide
  modified_base 30: mod_base = OTHER; note = 2'-O-methyl modified nucleotide
  modified_base 31: mod_base = OTHER; note = 2'-O-methyl modified nucleotide
  modified_base 32: mod_base = OTHER; note = 2'-O-methyl modified nucleotide
  modified_base 33: mod_base = OTHER; note = 2'-O-methyl modified nucleotide
  modified_base 34: mod_base = OTHER; note = 2'-O-methyl modified nucleotide
  modified_base 35: mod_base = OTHER; note = 2'-O-methyl modified nucleotide
  modified_base 36: mod_base = OTHER; note = 2'-O-methyl modified nucleotide
  modified_base 37: mod_base = OTHER; note = 2'-O-methyl modified nucleotide
  modified_base 38: mod_base = OTHER; note = 2'-O-methyl modified nucleotide
  modified_base 39: mod_base = OTHER; note = 2'-O-methyl modified nucleotide
  modified_base 40: mod_base = OTHER; note = 2'-O-methyl modified nucleotide
  modified_base 69: mod_base = OTHER; note = 2'-O-methyl modified nucleotide
  modified_base 70: mod_base = OTHER; note = 2'-O-methyl modified nucleotide
  modified_base 71: mod_base = OTHER; note = 2'-O-methyl modified nucleotide
  modified_base 72: mod_base = OTHER; note = 2'-O-methyl modified nucleotide
  modified_base 73: mod_base = OTHER; note = 2'-O-methyl modified nucleotide
  modified_base 74: mod_base = OTHER; note = 2'-O-methyl modified nucleotide
  modified_base 75: mod_base = OTHER; note = 2'-O-methyl modified nucleotide
  modified_base 76: mod_base = OTHER; note = 2'-O-methyl modified nucleotide
  modified_base 77: mod_base = OTHER; note = 2'-O-methyl modified nucleotide
  modified_base 78: mod_base = OTHER; note = 2'-O-methyl modified nucleotide
  modified_base 79: mod_base = OTHER; note = 2'-O-methyl modified nucleotide
  modified_base 80: mod_base = OTHER; note = 2'-O-methyl modified nucleotide
  modified_base 81: mod_base = OTHER; note = 2'-O-methyl modified nucleotide
  modified_base 82: mod_base = OTHER; note = 2'-O-methyl modified nucleotide
  modified_base 83: mod_base = OTHER; note = 2'-O-methyl modified nucleotide
  modified_base 84: mod_base = OTHER; note = 2'-O-methyl modified nucleotide
  modified_base 85: mod_base = OTHER; note = 2'-O-methyl modified nucleotide
  modified_base 86: mod_base = OTHER; note = 2'-O-methyl modified nucleotide
  modified_base 87: mod_base = OTHER; note = 2'-O-methyl modified nucleotide
  modified_base 88: mod_base = OTHER; note = 2'-O-methyl modified nucleotide
  modified_base 89: mod_base = OTHER; note = 2'-O-methyl modified nucleotide
  modified_base 90: mod_base = OTHER; note = 2'-O-methyl modified nucleotide
  modified_base 91: mod_base = OTHER; note = 2'-O-methyl modified nucleotide
  modified_base 92: mod_base = OTHER; note = 2'-O-methyl modified nucleotide
  modified_base 93: mod_base = OTHER; note = 2'-O-methyl modified nucleotide
  modified_base 94: mod_base = OTHER; note = 2'-O-methyl modified nucleotide
  modified_base 95: mod_base = OTHER; note = 2'-O-methyl modified nucleotide
  modified_base 96: mod_base = OTHER; note = 2'-O-methyl modified nucleotide
  modified_base 97: mod_base = OTHER; note = 2'-O-methyl modified nucleotide with phosphorothioate linkage
  modified_base 98: mod_base = OTHER; note = 2'-O-methyl modified nucleotide with phosphorothioate linkage
  modified_base 99: mod_base = OTHER; note = 2'-O-methyl modified nucleotide with phosphorothioate linkage
  modified_base 100: mod_base = OTHER; note = 2'-O-methyl modified nucleotide

SEQ ID NO: 70 - RNA, 100 nt, synthetic construct; identical to SEQ ID NO: 38
  source 1..100: mol_type = other RNA; note = Description of Artificial Sequence: Synthetic polynucleotide
  modified_base 1: mod_base = OTHER; note = 2'-O-methyl modified nucleotide with phosphorothioate linkage
  modified_base 2: mod_base = OTHER; note = 2'-O-methyl modified nucleotide with phosphorothioate linkage
  modified_base 3: mod_base = OTHER; note = 2'-O-methyl modified nucleotide with phosphorothioate linkage
  modified_base 29: mod_base = OTHER; note = 2'-O-methyl modified nucleotide
  modified_base 30: mod_base = OTHER; note = 2'-O-methyl modified nucleotide
  modified_base 31: mod_base = OTHER; note = 2'-O-methyl modified nucleotide
  modified_base 32: mod_base = OTHER; note = 2'-O-methyl modified nucleotide
  modified_base 33: mod_base = OTHER; note = 2'-O-methyl modified nucleotide
  modified_base 34: mod_base = OTHER; note = 2'-O-methyl modified nucleotide
  modified_base 35: mod_base = OTHER; note = 2'-O-methyl modified nucleotide
  modified_base 36: mod_base = OTHER; note = 2'-O-methyl modified nucleotide
  modified_base 37: mod_base = OTHER; note = 2'-O-methyl modified nucleotide
  modified_base 38: mod_base = OTHER; note = 2'-O-methyl modified nucleotide
  modified_base 39: mod_base = OTHER; note = 2'-O-methyl modified nucleotide
  modified_base 40: mod_base = OTHER; note = 2'-O-methyl modified nucleotide
  modified_base 69: mod_base = OTHER; note = 2'-O-methyl modified nucleotide
  modified_base 70: mod_base = OTHER; note = 2'-O-methyl modified nucleotide
  modified_base 71: mod_base = OTHER; note = 2'-O-methyl modified nucleotide
  modified_base 72: mod_base = OTHER; note = 2'-O-methyl modified nucleotide
  modified_base 73: mod_base = OTHER; note = 2'-O-methyl modified nucleotide
  modified_base 74: mod_base = OTHER; note = 2'-O-methyl modified nucleotide
  modified_base 75: mod_base = OTHER; note = 2'-O-methyl modified nucleotide
  modified_base 76: mod_base = OTHER; note = 2'-O-methyl modified nucleotide
  modified_base 77: mod_base = OTHER; note = 2'-O-methyl modified nucleotide
  modified_base 78: mod_base = OTHER; note = 2'-O-methyl modified nucleotide
  modified_base 79: mod_base = OTHER; note = 2'-O-methyl modified nucleotide
  modified_base 80: mod_base = OTHER; note = 2'-O-methyl modified nucleotide
  modified_base 81: mod_base = OTHER; note = 2'-O-methyl modified nucleotide
  modified_base 82: mod_base = OTHER; note = 2'-O-methyl modified nucleotide
  modified_base 83: mod_base = OTHER; note = 2'-O-methyl modified nucleotide
  modified_base 84: mod_base = OTHER; note = 2'-O-methyl modified nucleotide
  modified_base 85: mod_base = OTHER; note = 2'-O-methyl modified nucleotide
  modified_base 86: mod_base = OTHER; note = 2'-O-methyl modified nucleotide
  modified_base 87: mod_base = OTHER; note = 2'-O-methyl modified nucleotide
  modified_base 88: mod_base = OTHER; note = 2'-O-methyl modified nucleotide
  modified_base 89: mod_base = OTHER; note = 2'-O-methyl modified nucleotide
  modified_base 90: mod_base = OTHER; note = 2'-O-methyl modified nucleotide
  modified_base 91: mod_base = OTHER; note = 2'-O-methyl modified nucleotide
  modified_base 92: mod_base = OTHER; note = 2'-O-methyl modified nucleotide
  modified_base 93: mod_base = OTHER; note = 2'-O-methyl modified nucleotide
  modified_base 94: mod_base = OTHER; note = 2'-O-methyl modified nucleotide
  modified_base 95: mod_base = OTHER; note = 2'-O-methyl modified nucleotide
  modified_base 96: mod_base = OTHER; note = 2'-O-methyl modified nucleotide
  modified_base 97: mod_base = OTHER; note = 2'-O-methyl modified nucleotide with phosphorothioate linkage
  modified_base 98: mod_base = OTHER; note = 2'-O-methyl modified nucleotide with phosphorothioate linkage
  modified_base 99: mod_base = OTHER; note = 2'-O-methyl modified nucleotide with phosphorothioate linkage
  modified_base 100: mod_base = OTHER; note = 2'-O-methyl modified nucleotide

SEQ ID NO: 71 - RNA, 100 nt, synthetic construct; identical to SEQ ID NO: 39
  source 1..100: mol_type = other RNA; note = Description of Artificial Sequence: Synthetic polynucleotide
  modified_base 1: mod_base = OTHER; note = 2'-O-methyl modified nucleotide with phosphorothioate linkage
  modified_base 2: mod_base = OTHER; note = 2'-O-methyl modified nucleotide with phosphorothioate linkage
  modified_base 3: mod_base = OTHER; note = 2'-O-methyl modified nucleotide with phosphorothioate linkage
  modified_base 29: mod_base = OTHER; note = 2'-O-methyl modified nucleotide
  modified_base 30: mod_base = OTHER; note = 2'-O-methyl modified nucleotide
  modified_base 31: mod_base = OTHER; note = 2'-O-methyl modified nucleotide
  modified_base 32: mod_base = OTHER; note = 2'-O-methyl modified nucleotide
  modified_base 33: mod_base = OTHER; note = 2'-O-methyl modified nucleotide
  modified_base 34: mod_base = OTHER; note = 2'-O-methyl modified nucleotide
  modified_base 35: mod_base = OTHER; note = 2'-O-methyl modified nucleotide
  modified_base 36: mod_base = OTHER; note = 2'-O-methyl modified nucleotide
  modified_base 37: mod_base = OTHER; note = 2'-O-methyl modified nucleotide
  modified_base 38: mod_base = OTHER; note = 2'-O-methyl modified nucleotide
  modified_base 39: mod_base = OTHER; note = 2'-O-methyl modified nucleotide
  modified_base 40: mod_base = OTHER; note = 2'-O-methyl modified nucleotide
  modified_base 69: mod_base = OTHER; note = 2'-O-methyl modified nucleotide
  modified_base 70: mod_base = OTHER; note = 2'-O-methyl modified nucleotide
  modified_base 71: mod_base = OTHER; note = 2'-O-methyl modified nucleotide
  modified_base 72: mod_base = OTHER; note = 2'-O-methyl modified nucleotide
  modified_base 73: mod_base = OTHER; note = 2'-O-methyl modified nucleotide
  modified_base 74: mod_base = OTHER; note = 2'-O-methyl modified nucleotide
  modified_base 75: mod_base = OTHER; note = 2'-O-methyl modified nucleotide
  modified_base 76: mod_base = OTHER; note = 2'-O-methyl modified nucleotide
  modified_base 77: mod_base = OTHER; note = 2'-O-methyl modified nucleotide
  modified_base 78: mod_base = OTHER; note = 2'-O-methyl modified nucleotide
  modified_base 79: mod_base = OTHER; note = 2'-O-methyl modified nucleotide
  modified_base 80: mod_base = OTHER; note = 2'-O-methyl modified nucleotide
  modified_base 81: mod_base = OTHER; note = 2'-O-methyl modified nucleotide
  modified_base 82: mod_base = OTHER; note = 2'-O-methyl modified nucleotide
  modified_base 83: mod_base = OTHER; note = 2'-O-methyl modified nucleotide
  modified_base 84: mod_base = OTHER; note = 2'-O-methyl modified nucleotide
  modified_base 85: mod_base = OTHER; note = 2'-O-methyl modified nucleotide
  modified_base 86: mod_base = OTHER; note = 2'-O-methyl modified nucleotide
  modified_base 87: mod_base = OTHER; note = 2'-O-methyl modified nucleotide
  modified_base 88: mod_base = OTHER; note = 2'-O-methyl modified nucleotide
  modified_base 89: mod_base = OTHER; note = 2'-O-methyl modified nucleotide
  modified_base 90: mod_base = OTHER; note = 2'-O-methyl modified nucleotide
  modified_base 91: mod_base = OTHER; note = 2'-O-methyl modified nucleotide
  modified_base 92: mod_base = OTHER; note = 2'-O-methyl modified nucleotide
  modified_base 93: mod_base = OTHER; note = 2'-O-methyl modified nucleotide
  modified_base 94: mod_base = OTHER; note = 2'-O-methyl modified nucleotide
  modified_base 95: mod_base = OTHER; note = 2'-O-methyl modified nucleotide
  modified_base 96: mod_base = OTHER; note = 2'-O-methyl modified nucleotide
  modified_base 97: mod_base = OTHER; note = 2'-O-methyl modified nucleotide with phosphorothioate linkage
  modified_base 98: mod_base = OTHER; note = 2'-O-methyl modified nucleotide with phosphorothioate linkage
  modified_base 99: mod_base = OTHER; note = 2'-O-methyl modified nucleotide with phosphorothioate linkage
  modified_base 100: mod_base = OTHER; note = 2'-O-methyl modified nucleotide

SEQ ID NO: 72 - RNA, 100 nt, synthetic construct; identical to SEQ ID NO: 40
  source 1..100: mol_type = other RNA; note = Description of Artificial Sequence: Synthetic polynucleotide
  modified_base 1: mod_base = OTHER; note = 2'-O-methyl modified nucleotide with phosphorothioate linkage
  modified_base 2: mod_base = OTHER; note = 2'-O-methyl modified nucleotide with phosphorothioate linkage
  modified_base 3: mod_base = OTHER; note = 2'-O-methyl modified nucleotide with phosphorothioate linkage
  modified_base 29: mod_base = OTHER; note = 2'-O-methyl modified nucleotide
  modified_base 30: mod_base = OTHER; note = 2'-O-methyl modified nucleotide
  modified_base 31: mod_base = OTHER; note = 2'-O-methyl modified nucleotide
  modified_base 32: mod_base = OTHER; note = 2'-O-methyl modified nucleotide
  modified_base 33: mod_base = OTHER; note = 2'-O-methyl modified nucleotide
  modified_base 34: mod_base = OTHER; note = 2'-O-methyl modified nucleotide
  modified_base 35: mod_base = OTHER; note = 2'-O-methyl modified nucleotide
  modified_base 36: mod_base = OTHER; note = 2'-O-methyl modified nucleotide
  modified_base 37: mod_base = OTHER; note = 2'-O-methyl modified nucleotide
  modified_base 38: mod_base = OTHER; note = 2'-O-methyl modified nucleotide
  modified_base 39: mod_base = OTHER; note = 2'-O-methyl modified nucleotide
  modified_base 40: mod_base = OTHER; note = 2'-O-methyl modified nucleotide
  modified_base 69: mod_base = OTHER; note = 2'-O-methyl modified nucleotide
  modified_base 70: mod_base = OTHER; note = 2'-O-methyl modified nucleotide
  modified_base 71: mod_base = OTHER; note = 2'-O-methyl modified nucleotide
  modified_base 72: mod_base = OTHER; note = 2'-O-methyl modified nucleotide
  modified_base 73: mod_base = OTHER; note = 2'-O-methyl modified nucleotide
  modified_base 74: mod_base = OTHER; note = 2'-O-methyl modified nucleotide
  modified_base 75: mod_base = OTHER; note = 2'-O-methyl modified nucleotide
  modified_base 76: mod_base = OTHER; note = 2'-O-methyl modified nucleotide
  modified_base 77: mod_base = OTHER; note = 2'-O-methyl modified nucleotide
  modified_base 78: mod_base = OTHER; note = 2'-O-methyl modified nucleotide
  modified_base 79: mod_base = OTHER; note = 2'-O-methyl modified nucleotide
  modified_base 80: mod_base = OTHER; note = 2'-O-methyl modified nucleotide
  modified_base 81: mod_base = OTHER; note = 2'-O-methyl modified nucleotide
  modified_base 82: mod_base = OTHER; note = 2'-O-methyl modified nucleotide
  modified_base 83: mod_base = OTHER; note = 2'-O-methyl modified nucleotide
  modified_base 84: mod_base = OTHER; note = 2'-O-methyl modified nucleotide
  modified_base 85: mod_base = OTHER; note = 2'-O-methyl modified nucleotide
  modified_base 86: mod_base = OTHER; note = 2'-O-methyl modified nucleotide
  modified_base 87: mod_base = OTHER; note = 2'-O-methyl modified nucleotide
  modified_base 88: mod_base = OTHER; note = 2'-O-methyl modified nucleotide
  modified_base 89: mod_base = OTHER; note = 2'-O-methyl modified nucleotide
  modified_base 90: mod_base = OTHER; note = 2'-O-methyl modified nucleotide
  modified_base 91: mod_base = OTHER; note = 2'-O-methyl modified nucleotide
  modified_base 92: mod_base = OTHER; note = 2'-O-methyl modified nucleotide
  modified_base 93: mod_base = OTHER; note = 2'-O-methyl modified nucleotide
  modified_base 94: mod_base = OTHER; note = 2'-O-methyl modified nucleotide
  modified_base 95: mod_base = OTHER; note = 2'-O-methyl modified nucleotide
  modified_base 96: mod_base = OTHER; note = 2'-O-methyl modified nucleotide
  modified_base 97: mod_base = OTHER; note = 2'-O-methyl modified nucleotide with phosphorothioate linkage
  modified_base 98: mod_base = OTHER; note = 2'-O-methyl modified nucleotide with phosphorothioate linkage
  modified_base 99: mod_base = OTHER; note = 2'-O-methyl modified nucleotide with phosphorothioate linkage
  modified_base 100: mod_base = OTHER; note = 2'-O-methyl modified nucleotide

SEQ ID NO: 73 - RNA, 100 nt, synthetic construct; identical to SEQ ID NO: 41
  source 1..100: mol_type = other RNA; note = Description of Artificial Sequence: Synthetic polynucleotide
  modified_base 1: mod_base = OTHER; note = 2'-O-methyl modified nucleotide with phosphorothioate linkage
  modified_base 2: mod_base = OTHER; note = 2'-O-methyl modified nucleotide with phosphorothioate linkage
  modified_base 3: mod_base = OTHER; note = 2'-O-methyl modified nucleotide with phosphorothioate linkage
  modified_base 29: mod_base = OTHER; note = 2'-O-methyl modified nucleotide
  modified_base 30: mod_base = OTHER; note = 2'-O-methyl modified nucleotide
  modified_base 31: mod_base = OTHER; note = 2'-O-methyl modified nucleotide
  modified_base 32: mod_base = OTHER; note = 2'-O-methyl modified nucleotide
  modified_base 33: mod_base = OTHER; note = 2'-O-methyl modified nucleotide
  modified_base 34: mod_base = OTHER; note = 2'-O-methyl modified nucleotide
  modified_base 35: mod_base = OTHER; note = 2'-O-methyl modified nucleotide
  modified_base 36: mod_base = OTHER; note = 2'-O-methyl modified nucleotide
  modified_base 37: mod_base = OTHER; note = 2'-O-methyl modified nucleotide
  modified_base 38: mod_base = OTHER; note = 2'-O-methyl modified nucleotide
  modified_base 39: mod_base = OTHER; note = 2'-O-methyl modified nucleotide
  modified_base 40: mod_base = OTHER; note = 2'-O-methyl modified nucleotide
  modified_base 69: mod_base = OTHER; note = 2'-O-methyl modified nucleotide
  modified_base 70: mod_base = OTHER; note = 2'-O-methyl modified nucleotide
  modified_base 71: mod_base = OTHER; note = 2'-O-methyl modified nucleotide
  modified_base 72: mod_base = OTHER; note = 2'-O-methyl modified nucleotide
  modified_base 73: mod_base = OTHER; note = 2'-O-methyl modified nucleotide
  modified_base 74: mod_base = OTHER; note = 2'-O-methyl modified nucleotide
  modified_base 75: mod_base = OTHER; note = 2'-O-methyl modified nucleotide
  modified_base 76: mod_base = OTHER; note = 2'-O-methyl modified nucleotide
  modified_base 77: mod_base = OTHER; note = 2'-O-methyl modified nucleotide
  modified_base 78: mod_base = OTHER; note = 2'-O-methyl modified nucleotide
  modified_base 79: mod_base = OTHER; note = 2'-O-methyl modified nucleotide
  modified_base 80: mod_base = OTHER; note = 2'-O-methyl modified nucleotide
  modified_base 81: mod_base = OTHER; note = 2'-O-methyl modified nucleotide
  modified_base 82: mod_base = OTHER; note = 2'-O-methyl modified nucleotide
  modified_base 83: mod_base = OTHER; note = 2'-O-methyl modified nucleotide
  modified_base 84: mod_base = OTHER; note = 2'-O-methyl modified nucleotide
  modified_base 85: mod_base = OTHER; note = 2'-O-methyl modified nucleotide
  modified_base 86: mod_base = OTHER; note = 2'-O-methyl modified nucleotide
  modified_base 87: mod_base = OTHER; note = 2'-O-methyl modified nucleotide
  modified_base 88: mod_base = OTHER; note = 2'-O-methyl modified nucleotide
  modified_base 89: mod_base = OTHER; note = 2'-O-methyl modified nucleotide
  modified_base 90: mod_base = OTHER; note = 2'-O-methyl modified nucleotide
  modified_base 91: mod_base = OTHER; note = 2'-O-methyl modified nucleotide
  modified_base 92: mod_base = OTHER; note = 2'-O-methyl modified nucleotide
  modified_base 93: mod_base = OTHER; note = 2'-O-methyl modified nucleotide
  modified_base 94: mod_base = OTHER; note = 2'-O-methyl modified nucleotide
  modified_base 95: mod_base = OTHER; note = 2'-O-methyl modified nucleotide
  modified_base 96: mod_base = OTHER; note = 2'-O-methyl modified nucleotide
  modified_base 97: mod_base = OTHER; note = 2'-O-methyl modified nucleotide with phosphorothioate linkage
  modified_base 98: mod_base = OTHER; note = 2'-O-methyl modified nucleotide with phosphorothioate linkage
  modified_base 99: mod_base = OTHER; note = 2'-O-methyl modified nucleotide with phosphorothioate linkage
  modified_base 100: mod_base = OTHER; note = 2'-O-methyl modified nucleotide

SEQ ID NO: 74 - RNA, 100 nt, synthetic construct; identical to SEQ ID NO: 42
  source 1..100: mol_type = other RNA; note = Description of Artificial Sequence: Synthetic polynucleotide
  modified_base 1: mod_base = OTHER; note = 2'-O-methyl modified nucleotide with phosphorothioate linkage
  modified_base 2: mod_base = OTHER; note = 2'-O-methyl modified nucleotide with phosphorothioate linkage
  modified_base 3: mod_base = OTHER; note = 2'-O-methyl modified nucleotide with phosphorothioate linkage
  modified_base 29: mod_base = OTHER; note = 2'-O-methyl modified nucleotide
  modified_base 30: mod_base = OTHER; note = 2'-O-methyl modified nucleotide
  modified_base 31: mod_base = OTHER; note = 2'-O-methyl modified nucleotide
  modified_base 32: mod_base = OTHER; note = 2'-O-methyl modified nucleotide
  modified_base 33: mod_base = OTHER; note = 2'-O-methyl modified nucleotide
  modified_base 34: mod_base = OTHER; note = 2'-O-methyl modified nucleotide
  modified_base 35: mod_base = OTHER; note = 2'-O-methyl modified nucleotide
  modified_base 36: mod_base = OTHER; note = 2'-O-methyl modified nucleotide
  modified_base 37: mod_base = OTHER; note = 2'-O-methyl modified nucleotide
  modified_base 38: mod_base = OTHER; note = 2'-O-methyl modified nucleotide
  modified_base 39: mod_base = OTHER; note = 2'-O-methyl modified nucleotide
  modified_base 40: mod_base = OTHER; note = 2'-O-methyl modified nucleotide
  modified_base 69: mod_base = OTHER; note = 2'-O-methyl modified nucleotide
  modified_base 70: mod_base = OTHER; note = 2'-O-methyl modified nucleotide
  modified_base 71: mod_base = OTHER; note = 2'-O-methyl modified nucleotide
  modified_base 72: mod_base = OTHER; note = 2'-O-methyl modified nucleotide
  modified_base 73: mod_base = OTHER; note = 2'-O-methyl modified nucleotide
  modified_base 74: mod_base = OTHER; note = 2'-O-methyl modified nucleotide
  modified_base 75: mod_base = OTHER; note = 2'-O-methyl modified nucleotide
  modified_base 76: mod_base = OTHER; note = 2'-O-methyl modified nucleotide
  modified_base 77: mod_base = OTHER; note = 2'-O-methyl modified nucleotide
  modified_base 78: mod_base = OTHER; note = 2'-O-methyl modified nucleotide
  modified_base 79: mod_base = OTHER; note = 2'-O-methyl modified nucleotide
  modified_base 80: mod_base = OTHER; note = 2'-O-methyl modified nucleotide
  modified_base 81: mod_base = OTHER; note = 2'-O-methyl modified nucleotide
  modified_base 82: mod_base = OTHER; note = 2'-O-methyl modified nucleotide
  modified_base 83: mod_base = OTHER; note = 2'-O-methyl modified nucleotide
  modified_base 84: mod_base = OTHER; note = 2'-O-methyl modified nucleotide
  modified_base 85: mod_base = OTHER; note = 2'-O-methyl modified nucleotide
  modified_base 86: mod_base = OTHER; note = 2'-O-methyl modified nucleotide
  modified_base 87: mod_base = OTHER; note = 2'-O-methyl modified nucleotide
  modified_base 88: mod_base = OTHER; note = 2'-O-methyl modified nucleotide
  modified_base 89: mod_base = OTHER; note = 2'-O-methyl modified nucleotide
  modified_base 90: mod_base = OTHER; note = 2'-O-methyl modified nucleotide
  modified_base 91: mod_base = OTHER; note = 2'-O-methyl modified nucleotide
  modified_base 92: mod_base = OTHER; note = 2'-O-methyl modified nucleotide
  modified_base 93: mod_base = OTHER; note = 2'-O-methyl modified nucleotide
  modified_base 94: mod_base = OTHER; note = 2'-O-methyl modified nucleotide
  modified_base 95: mod_base = OTHER; note = 2'-O-methyl modified nucleotide
  modified_base 96: mod_base = OTHER; note = 2'-O-methyl modified nucleotide
  modified_base 97: mod_base = OTHER; note = 2'-O-methyl modified nucleotide with phosphorothioate linkage
  modified_base 98: mod_base = OTHER; note = 2'-O-methyl modified nucleotide with phosphorothioate linkage
  modified_base 99: mod_base = OTHER; note = 2'-O-methyl modified nucleotide with phosphorothioate linkage
  modified_base 100: mod_base = OTHER; note = 2'-O-methyl modified nucleotide

SEQ ID NO: 75 - RNA, 100 nt, synthetic construct; identical to SEQ ID NO: 43
  source 1..100: mol_type = other RNA; note = Description of Artificial Sequence: Synthetic polynucleotide
  modified_base 1: mod_base = OTHER; note = 2'-O-methyl modified nucleotide with phosphorothioate linkage
  modified_base 2: mod_base = OTHER; note = 2'-O-methyl modified nucleotide with phosphorothioate linkage
  modified_base 3: mod_base = OTHER; note = 2'-O-methyl modified nucleotide with phosphorothioate linkage
  modified_base 29: mod_base = OTHER; note = 2'-O-methyl modified nucleotide
  modified_base 30: mod_base = OTHER; note = 2'-O-methyl modified nucleotide
  modified_base 31: mod_base = OTHER; note = 2'-O-methyl modified nucleotide
  modified_base 32: mod_base = OTHER; note = 2'-O-methyl modified nucleotide
  modified_base 33: mod_base = OTHER; note = 2'-O-methyl modified nucleotide
  modified_base 34: mod_base = OTHER; note = 2'-O-methyl modified nucleotide
  modified_base 35: mod_base = OTHER; note = 2'-O-methyl modified nucleotide
  modified_base 36: mod_base = OTHER; note = 2'-O-methyl modified nucleotide
  modified_base 37: mod_base = OTHER; note = 2'-O-methyl modified nucleotide
  modified_base 38: mod_base = OTHER; note = 2'-O-methyl modified nucleotide
  modified_base 39: mod_base = OTHER; note = 2'-O-methyl modified nucleotide
  modified_base 40: mod_base = OTHER; note = 2'-O-methyl modified nucleotide
  modified_base 69: mod_base = OTHER; note = 2'-O-methyl modified nucleotide
  modified_base 70: mod_base = OTHER; note = 2'-O-methyl modified nucleotide
  modified_base 71: mod_base = OTHER; note = 2'-O-methyl modified nucleotide
  modified_base 72: mod_base = OTHER; note = 2'-O-methyl modified nucleotide
  modified_base 73: mod_base = OTHER; note = 2'-O-methyl modified nucleotide
  modified_base 74: mod_base = OTHER; note = 2'-O-methyl modified nucleotide
  modified_base 75: mod_base = OTHER; note = 2'-O-methyl modified nucleotide
  modified_base 76: mod_base = OTHER; note = 2'-O-methyl modified nucleotide
  modified_base 77: mod_base = OTHER; note = 2'-O-methyl modified nucleotide
  modified_base 78: mod_base = OTHER; note = 2'-O-methyl modified nucleotide
  modified_base 79: mod_base = OTHER; note = 2'-O-methyl modified nucleotide
  modified_base 80: mod_base = OTHER; note = 2'-O-methyl modified nucleotide
  modified_base 81: mod_base = OTHER; note = 2'-O-methyl modified nucleotide
  modified_base 82: mod_base = OTHER; note = 2'-O-methyl modified nucleotide
  modified_base 83: mod_base = OTHER; note = 2'-O-methyl modified nucleotide
  modified_base 84: mod_base = OTHER; note = 2'-O-methyl modified nucleotide
  modified_base 85: mod_base = OTHER; note = 2'-O-methyl modified nucleotide
  modified_base 86: mod_base = OTHER; note = 2'-O-methyl modified nucleotide
  modified_base 87: mod_base = OTHER; note = 2'-O-methyl modified nucleotide
  modified_base 88: mod_base = OTHER; note = 2'-O-methyl modified nucleotide
  modified_base 89: mod_base = OTHER; note = 2'-O-methyl modified nucleotide
  modified_base 90: mod_base = OTHER; note = 2'-O-methyl modified nucleotide
  modified_base 91: mod_base = OTHER; note = 2'-O-methyl modified nucleotide
  modified_base 92: mod_base = OTHER; note = 2'-O-methyl modified nucleotide
  modified_base 93: mod_base = OTHER; note = 2'-O-methyl modified nucleotide
  modified_base 94: mod_base = OTHER; note = 2'-O-methyl modified nucleotide
  modified_base 95: mod_base = OTHER; note = 2'-O-methyl modified nucleotide
  modified_base 96: mod_base = OTHER; note = 2'-O-methyl modified nucleotide
  modified_base 97: mod_base = OTHER; note = 2'-O-methyl modified nucleotide with phosphorothioate linkage
  modified_base 98: mod_base = OTHER; note = 2'-O-methyl modified nucleotide with phosphorothioate linkage
  modified_base 99: mod_base = OTHER; note = 2'-O-methyl modified nucleotide with phosphorothioate linkage
  modified_base 100: mod_base = OTHER; note = 2'-O-methyl modified nucleotide

SEQ ID NO: 76 - RNA, 100 nt, synthetic construct; identical to SEQ ID NO: 44
  source 1..100: mol_type = other RNA; note = Description of Artificial Sequence: Synthetic polynucleotide
  modified_base 1: mod_base = OTHER; note = 2'-O-methyl modified nucleotide with phosphorothioate linkage
  modified_base 2: mod_base = OTHER; note = 2'-O-methyl modified nucleotide with phosphorothioate linkage
  modified_base 3: mod_base = OTHER; note = 2'-O-methyl modified nucleotide with phosphorothioate linkage
  modified_base 29: mod_base = OTHER; note = 2'-O-methyl modified nucleotide
  modified_base 30: mod_base = OTHER; note = 2'-O-methyl modified nucleotide
  modified_base 31: mod_base = OTHER; note = 2'-O-methyl modified nucleotide
  modified_base 32: mod_base = OTHER; note = 2'-O-methyl modified nucleotide
  modified_base 33: mod_base = OTHER; note = 2'-O-methyl modified nucleotide
  modified_base 34: mod_base = OTHER; note = 2'-O-methyl modified nucleotide
  modified_base 35: mod_base = OTHER; note = 2'-O-methyl modified nucleotide
  modified_base 36: mod_base = OTHER; note = 2'-O-methyl modified nucleotide
  modified_base 37: mod_base = OTHER; note = 2'-O-methyl modified nucleotide
  modified_base 38: mod_base = OTHER; note = 2'-O-methyl modified nucleotide
  modified_base 39: mod_base = OTHER; note = 2'-O-methyl modified nucleotide
  modified_base 40: mod_base = OTHER; note = 2'-O-methyl modified nucleotide
  modified_base 69: mod_base = OTHER; note = 2'-O-methyl modified nucleotide
  modified_base 70: mod_base = OTHER; note = 2'-O-methyl modified nucleotide
  modified_base 71: mod_base = OTHER; note = 2'-O-methyl modified nucleotide
  modified_base 72: mod_base = OTHER; note = 2'-O-methyl modified nucleotide
  modified_base 73: mod_base = OTHER; note = 2'-O-methyl modified nucleotide
  modified_base 74: mod_base = OTHER; note = 2'-O-methyl modified nucleotide
  modified_base 75: mod_base = OTHER; note = 2'-O-methyl modified nucleotide
  modified_base 76: mod_base = OTHER; note = 2'-O-methyl modified nucleotide
  modified_base 77: mod_base = OTHER; note = 2'-O-methyl modified nucleotide
  modified_base 78: mod_base = OTHER; note = 2'-O-methyl modified nucleotide
  modified_base 79: mod_base = OTHER; note = 2'-O-methyl modified nucleotide
  modified_base 80: mod_base = OTHER; note = 2'-O-methyl modified nucleotide
  modified_base 81: mod_base = OTHER; note = 2'-O-methyl modified nucleotide
  modified_base 82: mod_base = OTHER; note = 2'-O-methyl modified nucleotide
  modified_base 83: mod_base = OTHER; note = 2'-O-methyl modified nucleotide
  modified_base 84: mod_base = OTHER; note = 2'-O-methyl modified nucleotide
  modified_base 85: mod_base = OTHER; note = 2'-O-methyl modified nucleotide
  modified_base 86: mod_base = OTHER; note = 2'-O-methyl modified nucleotide
  modified_base 87: mod_base = OTHER; note = 2'-O-methyl modified nucleotide
  modified_base 88: mod_base = OTHER; note = 2'-O-methyl modified nucleotide
  modified_base 89: mod_base = OTHER; note = 2'-O-methyl modified nucleotide
  modified_base 90: mod_base = OTHER; note = 2'-O-methyl modified nucleotide
  modified_base 91: mod_base = OTHER; note = 2'-O-methyl modified nucleotide
  modified_base 92: mod_base = OTHER; note = 2'-O-methyl modified nucleotide
  modified_base 93: mod_base = OTHER; note = 2'-O-methyl modified nucleotide
  modified_base 94: mod_base = OTHER; note = 2'-O-methyl modified nucleotide
  modified_base 95: mod_base = OTHER; note = 2'-O-methyl modified nucleotide
  modified_base 96: mod_base = OTHER; note = 2'-O-methyl modified nucleotide
  modified_base 97: mod_base = OTHER; note = 2'-O-methyl modified nucleotide with phosphorothioate linkage
  modified_base 98: mod_base = OTHER; note = 2'-O-methyl modified nucleotide with phosphorothioate linkage
  modified_base 99: mod_base = OTHER; note = 2'-O-methyl modified nucleotide with phosphorothioate linkage
  modified_base 100: mod_base = OTHER; note = 2'-O-methyl modified nucleotide

SEQ ID NO: 77 - RNA, 100 nt, synthetic construct; identical to SEQ ID NO: 45
  source 1..100: mol_type = other RNA; note = Description of Artificial Sequence: Synthetic polynucleotide
  modified_base 1: mod_base = OTHER; note = 2'-O-methyl modified nucleotide with phosphorothioate linkage
  modified_base 2: mod_base = OTHER; note = 2'-O-methyl modified nucleotide with phosphorothioate linkage
  modified_base 3: mod_base = OTHER; note = 2'-O-methyl modified nucleotide with phosphorothioate linkage
  modified_base 29: mod_base = OTHER; note = 2'-O-methyl modified nucleotide
  modified_base 30: mod_base = OTHER; note = 2'-O-methyl modified nucleotide
  modified_base 31: mod_base = OTHER; note = 2'-O-methyl modified nucleotide
  modified_base 32: mod_base = OTHER; note = 2'-O-methyl modified nucleotide
  modified_base 33: mod_base = OTHER; note = 2'-O-methyl modified nucleotide
  modified_base 34: mod_base = OTHER; note = 2'-O-methyl modified nucleotide
  modified_base 35: mod_base = OTHER; note = 2'-O-methyl modified nucleotide
  modified_base 36: mod_base = OTHER; note = 2'-O-methyl modified nucleotide
  modified_base 37: mod_base = OTHER; note = 2'-O-methyl modified nucleotide
  modified_base 38: mod_base = OTHER; note = 2'-O-methyl modified nucleotide
  modified_base 39: mod_base = OTHER; note = 2'-O-methyl modified nucleotide
  modified_base 40: mod_base = OTHER; note = 2'-O-methyl modified nucleotide
  modified_base 69: mod_base = OTHER; note = 2'-O-methyl modified nucleotide
  modified_base 70: mod_base = OTHER; note = 2'-O-methyl modified nucleotide
  modified_base 71: mod_base = OTHER; note = 2'-O-methyl modified nucleotide
  modified_base 72: mod_base = OTHER; note = 2'-O-methyl modified nucleotide
  modified_base 73: mod_base = OTHER; note = 2'-O-methyl modified nucleotide
  modified_base 74: mod_base = OTHER; note = 2'-O-methyl modified nucleotide
  modified_base 75: mod_base = OTHER; note = 2'-O-methyl modified nucleotide
  modified_base 76: mod_base = OTHER; note = 2'-O-methyl modified nucleotide
  modified_base 77: mod_base = OTHER; note = 2'-O-methyl modified nucleotide
  modified_base 78: mod_base = OTHER; note = 2'-O-methyl modified nucleotide
  modified_base 79: mod_base = OTHER; note = 2'-O-methyl modified nucleotide
  modified_base 80: mod_base = OTHER; note = 2'-O-methyl modified nucleotide
  modified_base 81: mod_base = OTHER; note = 2'-O-methyl modified nucleotide
  modified_base 82: mod_base = OTHER; note = 2'-O-methyl modified nucleotide
  modified_base 83: mod_base = OTHER; note = 2'-O-methyl modified nucleotide
  modified_base 84: mod_base = OTHER; note = 2'-O-methyl modified nucleotide
  modified_base 85: mod_base = OTHER; note = 2'-O-methyl modified nucleotide
  modified_base 86: mod_base = OTHER; note = 2'-O-methyl modified nucleotide
  modified_base 87: mod_base = OTHER; note = 2'-O-methyl modified nucleotide
  modified_base 88: mod_base = OTHER; note = 2'-O-methyl modified nucleotide
  modified_base 89: mod_base = OTHER; note = 2'-O-methyl modified nucleotide
  modified_base 90: mod_base = OTHER; note = 2'-O-methyl modified nucleotide
  modified_base 91: mod_base = OTHER; note = 2'-O-methyl modified nucleotide
  modified_base 92: mod_base = OTHER; note = 2'-O-methyl modified nucleotide
  modified_base 93: mod_base = OTHER; note = 2'-O-methyl modified nucleotide
  modified_base 94: mod_base = OTHER; note = 2'-O-methyl modified nucleotide
  modified_base 95: mod_base = OTHER; note = 2'-O-methyl modified nucleotide
  modified_base 96: mod_base = OTHER; note = 2'-O-methyl modified nucleotide
  modified_base 97: mod_base = OTHER; note = 2'-O-methyl modified nucleotide with phosphorothioate linkage
  modified_base 98: mod_base = OTHER; note = 2'-O-methyl modified nucleotide with phosphorothioate linkage
  modified_base 99: mod_base = OTHER; note = 2'-O-methyl modified nucleotide with phosphorothioate linkage
  modified_base 100: mod_base = OTHER; note = 2'-O-methyl modified nucleotide

SEQ ID NO: 78 - RNA, 100 nt, synthetic construct; identical to SEQ ID NO: 46
  source 1..100: mol_type = other RNA; note = Description of Artificial Sequence: Synthetic polynucleotide
  modified_base 1: mod_base = OTHER; note = 2'-O-methyl modified nucleotide with phosphorothioate linkage
  modified_base 2: mod_base = OTHER; note = 2'-O-methyl modified nucleotide with phosphorothioate linkage
  modified_base 3: mod_base = OTHER; note = 2'-O-methyl modified nucleotide with phosphorothioate linkage
  modified_base 29: mod_base = OTHER; note = 2'-O-methyl modified nucleotide
  modified_base 30: mod_base = OTHER; note = 2'-O-methyl modified nucleotide
  modified_base 31: mod_base = OTHER; note = 2'-O-methyl modified nucleotide
  modified_base 32: mod_base = OTHER; note = 2'-O-methyl modified nucleotide
  modified_base 33: mod_base = OTHER; note = 2'-O-methyl modified nucleotide
  modified_base 34: mod_base = OTHER; note = 2'-O-methyl modified nucleotide
  modified_base 35: mod_base = OTHER; note = 2'-O-methyl modified nucleotide
  modified_base 36: mod_base = OTHER; note = 2'-O-methyl modified nucleotide
  modified_base 37: mod_base = OTHER; note = 2'-O-methyl modified nucleotide
  modified_base 38: mod_base = OTHER; note = 2'-O-methyl modified nucleotide
  modified_base 39: mod_base = OTHER; note = 2'-O-methyl modified nucleotide
  modified_base 40: mod_base = OTHER; note = 2'-O-methyl modified nucleotide
  modified_base 69: mod_base = OTHER; note = 2'-O-methyl modified nucleotide
  modified_base 70: mod_base = OTHER; note = 2'-O-methyl modified nucleotide
  modified_base 71: mod_base = OTHER; note = 2'-O-methyl modified nucleotide
  modified_base 72: mod_base = OTHER; note = 2'-O-methyl modified nucleotide
  modified_base 73: mod_base = OTHER; note = 2'-O-methyl modified nucleotide
  modified_base 74: mod_base = OTHER; note = 2'-O-methyl modified nucleotide
  modified_base 75: mod_base = OTHER; note = 2'-O-methyl modified nucleotide
  modified_base 76: mod_base = OTHER; note = 2'-O-methyl modified nucleotide
  modified_base 77: mod_base = OTHER; note = 2'-O-methyl modified nucleotide
  modified_base 78: mod_base = OTHER; note = 2'-O-methyl modified nucleotide
  modified_base 79: mod_base = OTHER; note = 2'-O-methyl modified nucleotide
  modified_base 80: mod_base = OTHER; note = 2'-O-methyl modified nucleotide
  modified_base 81: mod_base = OTHER; note = 2'-O-methyl modified nucleotide
  modified_base 82: mod_base = OTHER; note = 2'-O-methyl modified nucleotide
  modified_base 83: mod_base = OTHER; note = 2'-O-methyl modified nucleotide
  modified_base 84: mod_base = OTHER; note = 2'-O-methyl modified nucleotide
  modified_base 85: mod_base = OTHER; note = 2'-O-methyl modified nucleotide
  modified_base 86: mod_base = OTHER; note = 2'-O-methyl modified nucleotide
  modified_base 87: mod_base = OTHER; note = 2'-O-methyl modified nucleotide
  modified_base 88: mod_base = OTHER; note = 2'-O-methyl modified nucleotide
  modified_base 89: mod_base = OTHER; note = 2'-O-methyl modified nucleotide
  modified_base 90: mod_base = OTHER; note = 2'-O-methyl modified nucleotide
  modified_base 91: mod_base = OTHER; note = 2'-O-methyl modified nucleotide
  modified_base 92: mod_base = OTHER; note = 2'-O-methyl modified nucleotide
  modified_base 93: mod_base = OTHER; note = 2'-O-methyl modified nucleotide
  modified_base 94: mod_base = OTHER; note = 2'-O-methyl modified nucleotide
  modified_base 95: mod_base = OTHER; note = 2'-O-methyl modified nucleotide
  modified_base 96: mod_base = OTHER; note = 2'-O-methyl modified nucleotide
  modified_base 97: mod_base = OTHER; note = 2'-O-methyl modified nucleotide with phosphorothioate linkage
  modified_base 98: mod_base = OTHER; note = 2'-O-methyl modified nucleotide with phosphorothioate linkage
  modified_base 99: mod_base = OTHER; note = 2'-O-methyl modified nucleotide with phosphorothioate linkage
  modified_base 100: mod_base = OTHER; note = 2'-O-methyl modified nucleotide

SEQ ID NO: 79 - RNA, 100 nt, synthetic construct; identical to SEQ ID NO: 47
  source 1..100: mol_type = other RNA; note = Description of Artificial Sequence: Synthetic polynucleotide
  modified_base 1: mod_base = OTHER; note = 2'-O-methyl modified nucleotide with phosphorothioate linkage
  modified_base 2: mod_base = OTHER; note = 2'-O-methyl modified nucleotide with phosphorothioate linkage
  modified_base 3: mod_base = OTHER; note = 2'-O-methyl modified nucleotide with phosphorothioate linkage
  modified_base 29: mod_base = OTHER; note = 2'-O-methyl modified nucleotide
  modified_base 30: mod_base = OTHER; note = 2'-O-methyl modified nucleotide
  modified_base 31: mod_base = OTHER; note = 2'-O-methyl modified nucleotide
  modified_base 32: mod_base = OTHER; note = 2'-O-methyl modified nucleotide
  modified_base 33: mod_base = OTHER; note = 2'-O-methyl modified nucleotide
  modified_base 34: mod_base = OTHER; note = 2'-O-methyl modified nucleotide
  modified_base 35: mod_base = OTHER; note = 2'-O-methyl modified nucleotide
  modified_base 36: mod_base = OTHER; note = 2'-O-methyl modified nucleotide
  modified_base 37: mod_base = OTHER; note = 2'-O-methyl modified nucleotide
  modified_base 38: mod_base = OTHER; note = 2'-O-methyl modified nucleotide
  modified_base 39: mod_base = OTHER; note = 2'-O-methyl modified nucleotide
  modified_base 40: mod_base = OTHER; note = 2'-O-methyl modified nucleotide
  modified_base 69: mod_base = OTHER; note = 2'-O-methyl modified nucleotide
  modified_base 70: mod_base = OTHER; note = 2'-O-methyl modified nucleotide
  modified_base 71: mod_base = OTHER; note = 2'-O-methyl modified nucleotide
  modified_base 72: mod_base = OTHER; note = 2'-O-methyl modified nucleotide
  modified_base 73: mod_base = OTHER; note = 2'-O-methyl modified nucleotide
  modified_base 74: mod_base = OTHER; note = 2'-O-methyl modified nucleotide
  modified_base 75: mod_base = OTHER; note = 2'-O-methyl modified nucleotide
  modified_base 76: mod_base = OTHER; note = 2'-O-methyl modified nucleotide
  modified_base 77: mod_base = OTHER; note = 2'-O-methyl modified nucleotide
  modified_base 78: mod_base = OTHER; note = 2'-O-methyl modified nucleotide
  modified_base 79: mod_base = OTHER; note = 2'-O-methyl modified nucleotide
  modified_base 80: mod_base = OTHER; note = 2'-O-methyl modified nucleotide
  modified_base 81: mod_base = OTHER; note = 2'-O-methyl modified nucleotide
  modified_base 82: mod_base = OTHER; note = 2'-O-methyl modified nucleotide
  modified_base 83: mod_base = OTHER; note = 2'-O-methyl modified nucleotide
  modified_base 84: mod_base = OTHER; note = 2'-O-methyl modified nucleotide
  modified_base 85: mod_base = OTHER; note = 2'-O-methyl modified nucleotide
  modified_base 86: mod_base = OTHER; note = 2'-O-methyl modified nucleotide
  modified_base 87: mod_base = OTHER; note = 2'-O-methyl modified nucleotide
  modified_base 88: mod_base = OTHER; note = 2'-O-methyl modified nucleotide
  modified_base 89: mod_base = OTHER; note = 2'-O-methyl modified nucleotide
  modified_base 90: mod_base = OTHER; note = 2'-O-methyl modified nucleotide
  modified_base 91: mod_base = OTHER; note = 2'-O-methyl modified nucleotide
  modified_base 92: mod_base = OTHER; note = 2'-O-methyl modified nucleotide
  modified_base 93: mod_base = OTHER; note = 2'-O-methyl modified nucleotide
  modified_base 94: mod_base = OTHER; note = 2'-O-methyl modified nucleotide
  modified_base 95: mod_base = OTHER; note = 2'-O-methyl modified nucleotide
  modified_base 96: mod_base = OTHER; note = 2'-O-methyl modified nucleotide
  modified_base 97: mod_base = OTHER; note = 2'-O-methyl modified nucleotide with phosphorothioate linkage
  modified_base 98: mod_base = OTHER; note = 2'-O-methyl modified nucleotide with phosphorothioate linkage
  modified_base 99: mod_base = OTHER; note = 2'-O-methyl modified nucleotide with phosphorothioate linkage
  modified_base 100: mod_base = OTHER; note = 2'-O-methyl modified nucleotide

SEQ ID NO: 80 - RNA, 100 nt, synthetic construct; identical to SEQ ID NO: 48
  source 1..100: mol_type = other RNA; note = Description of Artificial Sequence: Synthetic polynucleotide
  modified_base 1: mod_base = OTHER; note = 2'-O-methyl modified nucleotide with phosphorothioate linkage
  modified_base 2: mod_base = OTHER; note = 2'-O-methyl modified nucleotide with phosphorothioate linkage
  modified_base 3: mod_base = OTHER; note = 2'-O-methyl modified nucleotide with phosphorothioate linkage
  modified_base 29: mod_base = OTHER; note = 2'-O-methyl modified nucleotide
  modified_base 30: mod_base = OTHER; note = 2'-O-methyl modified nucleotide
  modified_base 31: mod_base = OTHER; note = 2'-O-methyl modified nucleotide
  modified_base 32: mod_base = OTHER; note = 2'-O-methyl modified nucleotide
  modified_base 33: mod_base = OTHER; note = 2'-O-methyl modified nucleotide
  modified_base 34: mod_base = OTHER; note = 2'-O-methyl modified nucleotide
  modified_base 35: mod_base = OTHER; note = 2'-O-methyl modified nucleotide
  modified_base 36: mod_base = OTHER; note = 2'-O-methyl modified nucleotide
  modified_base 37: mod_base = OTHER; note = 2'-O-methyl modified nucleotide
  modified_base 38: mod_base = OTHER; note = 2'-O-methyl modified nucleotide
  modified_base 39: mod_base = OTHER; note = 2'-O-methyl modified nucleotide
  modified_base 40: mod_base = OTHER; note = 2'-O-methyl modified nucleotide
  modified_base 69: mod_base = OTHER; note = 2'-O-methyl modified nucleotide
  modified_base 70: mod_base = OTHER; note = 2'-O-methyl modified nucleotide
  modified_base 71: mod_base = OTHER; note = 2'-O-methyl modified nucleotide
  modified_base 72: mod_base = OTHER; note = 2'-O-methyl modified nucleotide
  modified_base 73: mod_base = OTHER; note = 2'-O-methyl modified nucleotide
  modified_base 74: mod_base = OTHER; note = 2'-O-methyl modified nucleotide
  modified_base 75: mod_base = OTHER; note = 2'-O-methyl modified nucleotide
  modified_base 76: mod_base = OTHER; note = 2'-O-methyl modified nucleotide
  modified_base 77: mod_base = OTHER; note = 2'-O-methyl modified nucleotide
  modified_base 78: mod_base = OTHER; note = 2'-O-methyl modified nucleotide
  modified_base 79: mod_base = OTHER; note = 2'-O-methyl modified nucleotide
  modified_base 80: mod_base = OTHER; note = 2'-O-methyl modified nucleotide
  modified_base 81: mod_base = OTHER; note = 2'-O-methyl modified nucleotide
  modified_base 82: mod_base = OTHER; note = 2'-O-methyl modified nucleotide
  modified_base 83: mod_base = OTHER; note = 2'-O-methyl modified nucleotide
  modified_base 84: mod_base = OTHER; note = 2'-O-methyl modified nucleotide
  modified_base 85: mod_base = OTHER; note = 2'-O-methyl modified nucleotide
  modified_base 86: mod_base = OTHER; note = 2'-O-methyl modified nucleotide
  modified_base 87: mod_base = OTHER; note = 2'-O-methyl modified nucleotide
  modified_base 88: mod_base = OTHER; note = 2'-O-methyl modified nucleotide
  modified_base 89: mod_base = OTHER; note = 2'-O-methyl modified nucleotide
  modified_base 90: mod_base = OTHER; note = 2'-O-methyl modified nucleotide
  modified_base 91: mod_base = OTHER; note = 2'-O-methyl modified nucleotide
  modified_base 92: mod_base = OTHER; note = 2'-O-methyl modified nucleotide
  modified_base 93: mod_base = OTHER; note = 2'-O-methyl modified nucleotide
  modified_base 94: mod_base = OTHER; note = 2'-O-methyl modified nucleotide
  modified_base 95: mod_base = OTHER; note = 2'-O-methyl modified nucleotide
  modified_base 96: mod_base = OTHER; note = 2'-O-methyl modified nucleotide
  modified_base 97: mod_base = OTHER; note = 2'-O-methyl modified nucleotide with phosphorothioate linkage
  modified_base 98: mod_base = OTHER; note = 2'-O-methyl modified nucleotide with phosphorothioate linkage
  modified_base 99: mod_base = OTHER; note = 2'-O-methyl modified nucleotide with phosphorothioate linkage
  modified_base 100: mod_base = OTHER; note = 2'-O-methyl modified nucleotide

SEQ ID NO: 81 - RNA, 100 nt, synthetic construct; identical to SEQ ID NO: 49
  source 1..100: mol_type = other RNA; note = Description of Artificial Sequence: Synthetic polynucleotide
  modified_base 1: mod_base = OTHER; note = 2'-O-methyl modified nucleotide with phosphorothioate linkage
  modified_base 2: mod_base = OTHER; note = 2'-O-methyl modified nucleotide with phosphorothioate linkage
  modified_base 3: mod_base = OTHER; note = 2'-O-methyl modified nucleotide with phosphorothioate linkage
  modified_base 29: mod_base = OTHER; note = 2'-O-methyl modified nucleotide
  modified_base 30: mod_base = OTHER; note = 2'-O-methyl modified nucleotide
  modified_base 31: mod_base = OTHER; note = 2'-O-methyl modified nucleotide
  modified_base 32: mod_base = OTHER; note = 2'-O-methyl modified nucleotide
  modified_base 33: mod_base = OTHER; note = 2'-O-methyl modified nucleotide
  modified_base 34: mod_base = OTHER; note = 2'-O-methyl modified nucleotide
  modified_base 35: mod_base = OTHER; note = 2'-O-methyl modified nucleotide
  modified_base 36: mod_base = OTHER; note = 2'-O-methyl modified nucleotide
  modified_base 37: mod_base = OTHER; note = 2'-O-methyl modified nucleotide
  modified_base 38: mod_base = OTHER; note = 2'-O-methyl modified nucleotide
  modified_base 39: mod_base = OTHER; note = 2'-O-methyl modified nucleotide
  modified_base 40: mod_base = OTHER; note = 2'-O-methyl modified nucleotide
  modified_base 69: mod_base = OTHER; note = 2'-O-methyl modified nucleotide
  modified_base 70: mod_base = OTHER; note = 2'-O-methyl modified nucleotide
  modified_base 71: mod_base = OTHER; note = 2'-O-methyl modified nucleotide
  modified_base 72: mod_base = OTHER; note = 2'-O-methyl modified nucleotide
  modified_base 73: mod_base = OTHER; note = 2'-O-methyl modified nucleotide
  modified_base 74: mod_base = OTHER; note = 2'-O-methyl modified nucleotide
  modified_base 75: mod_base = OTHER; note = 2'-O-methyl modified nucleotide
  modified_base 76: mod_base = OTHER; note = 2'-O-methyl modified nucleotide
  modified_base 77: mod_base = OTHER; note = 2'-O-methyl modified nucleotide
  modified_base 78: mod_base = OTHER; note = 2'-O-methyl modified nucleotide
  modified_base 79: mod_base = OTHER; note = 2'-O-methyl modified nucleotide
  modified_base 80: mod_base = OTHER; note = 2'-O-methyl modified nucleotide
  modified_base 81: mod_base = OTHER; note = 2'-O-methyl modified nucleotide
  modified_base 82: mod_base = OTHER; note = 2'-O-methyl modified nucleotide
  modified_base 83: mod_base = OTHER; note = 2'-O-methyl modified nucleotide
  modified_base 84: mod_base = OTHER; note = 2'-O-methyl modified nucleotide
  modified_base 85: mod_base = OTHER; note = 2'-O-methyl modified nucleotide
  modified_base 86: mod_base = OTHER; note = 2'-O-methyl modified nucleotide
  modified_base 87: mod_base = OTHER; note = 2'-O-methyl modified nucleotide
  modified_base 88: mod_base = OTHER; note = 2'-O-methyl modified nucleotide
  modified_base 89: mod_base = OTHER; note = 2'-O-methyl modified nucleotide
  modified_base 90: mod_base = OTHER; note = 2'-O-methyl modified nucleotide
  modified_base 91: mod_base = OTHER; note = 2'-O-methyl modified nucleotide
  modified_base 92: mod_base = OTHER; note = 2'-O-methyl modified nucleotide
  modified_base 93: mod_base = OTHER; note = 2'-O-methyl modified nucleotide
  modified_base 94: mod_base = OTHER; note = 2'-O-methyl modified nucleotide
  modified_base 95: mod_base = OTHER; note = 2'-O-methyl modified nucleotide
  modified_base 96: mod_base = OTHER; note = 2'-O-methyl modified nucleotide
  modified_base 97: mod_base = OTHER; note = 2'-O-methyl modified nucleotide with phosphorothioate linkage
  modified_base 98: mod_base = OTHER; note = 2'-O-methyl modified nucleotide with phosphorothioate linkage
  modified_base 99: mod_base = OTHER; note = 2'-O-methyl modified nucleotide with phosphorothioate linkage
  modified_base 100: mod_base = OTHER; note = 2'-O-methyl modified nucleotide

SEQ ID NO: 82 - RNA, 100 nt, synthetic construct; identical to SEQ ID NO: 50
  source 1..100: mol_type = other RNA; note = Description of Artificial Sequence: Synthetic polynucleotide
  modified_base 1: mod_base = OTHER; note = 2'-O-methyl modified nucleotide with phosphorothioate linkage
  modified_base 2: mod_base = OTHER; note = 2'-O-methyl modified nucleotide with phosphorothioate linkage
  modified_base 3: mod_base = OTHER; note = 2'-O-methyl modified nucleotide with phosphorothioate linkage
  modified_base 29: mod_base = OTHER; note = 2'-O-methyl modified nucleotide
  modified_base 30: mod_base = OTHER; note = 2'-O-methyl modified nucleotide
  modified_base 31: mod_base = OTHER; note = 2'-O-methyl modified nucleotide
  modified_base 32: mod_base = OTHER; note = 2'-O-methyl modified nucleotide
  modified_base 33: mod_base = OTHER; note = 2'-O-methyl modified nucleotide
  modified_base 34: mod_base = OTHER; note = 2'-O-methyl modified nucleotide
  modified_base 35: mod_base = OTHER; note = 2'-O-methyl modified nucleotide
  modified_base 36: mod_base = OTHER; note = 2'-O-methyl modified nucleotide
  modified_base 37: mod_base = OTHER; note = 2'-O-methyl modified nucleotide
  modified_base 38: mod_base = OTHER; note = 2'-O-methyl modified nucleotide
  modified_base 39: mod_base = OTHER; note = 2'-O-methyl modified nucleotide
  modified_base 40: mod_base = OTHER; note = 2'-O-methyl modified nucleotide
  modified_base 69: mod_base = OTHER; note = 2'-O-methyl modified nucleotide
  modified_base 70: mod_base = OTHER; note = 2'-O-methyl modified nucleotide
  modified_base 71: mod_base = OTHER; note = 2'-O-methyl modified nucleotide
  modified_base 72: mod_base = OTHER; note = 2'-O-methyl modified nucleotide
  modified_base 73: mod_base = OTHER; note = 2'-O-methyl modified nucleotide
  modified_base 74: mod_base = OTHER; note = 2'-O-methyl modified nucleotide
  modified_base 75: mod_base = OTHER; note = 2'-O-methyl modified nucleotide
  modified_base 76: mod_base = OTHER; note = 2'-O-methyl modified nucleotide
  modified_base 77: mod_base = OTHER; note = 2'-O-methyl modified nucleotide
  modified_base 78: mod_base = OTHER; note = 2'-O-methyl modified nucleotide
  modified_base 79: mod_base = OTHER; note = 2'-O-methyl modified nucleotide
  modified_base 80: mod_base = OTHER; note = 2'-O-methyl modified nucleotide
  modified_base 81: mod_base = OTHER; note = 2'-O-methyl modified nucleotide
  modified_base 82: mod_base = OTHER; note = 2'-O-methyl modified nucleotide
  modified_base 83: mod_base = OTHER; note = 2'-O-methyl modified nucleotide
  modified_base 84: mod_base = OTHER; note = 2'-O-methyl modified nucleotide
  modified_base 85: mod_base = OTHER; note = 2'-O-methyl modified nucleotide
  modified_base 86: mod_base = OTHER; note = 2'-O-methyl modified nucleotide
  modified_base 87: mod_base = OTHER; note = 2'-O-methyl modified nucleotide
  modified_base 88: mod_base = OTHER; note = 2'-O-methyl modified nucleotide
  modified_base 89: mod_base = OTHER; note = 2'-O-methyl modified nucleotide
  modified_base 90: mod_base = OTHER; note = 2'-O-methyl modified nucleotide
  modified_base 91: mod_base = OTHER; note = 2'-O-methyl modified nucleotide
  modified_base 92: mod_base = OTHER; note = 2'-O-methyl modified nucleotide
  modified_base 93: mod_base = OTHER; note = 2'-O-methyl modified nucleotide
  modified_base 94: mod_base = OTHER; note = 2'-O-methyl modified nucleotide
  modified_base 95: mod_base = OTHER; note = 2'-O-methyl modified nucleotide
  modified_base 96: mod_base = OTHER; note = 2'-O-methyl modified nucleotide
  modified_base 97: mod_base = OTHER; note = 2'-O-methyl modified nucleotide with phosphorothioate linkage
  modified_base 98: mod_base = OTHER; note = 2'-O-methyl modified nucleotide with phosphorothioate linkage
  modified_base 99: mod_base = OTHER; note = 2'-O-methyl modified nucleotide with phosphorothioate linkage
  modified_base 100: mod_base = OTHER; note = 2'-O-methyl modified nucleotide

SEQ ID NO: 83 - RNA, 100 nt, synthetic construct; identical to SEQ ID NO: 51
  source 1..100: mol_type = other RNA; note = Description of Artificial Sequence: Synthetic polynucleotide
  modified_base 1: mod_base = OTHER; note = 2'-O-methyl modified nucleotide with phosphorothioate linkage
  modified_base 2: mod_base = OTHER; note = 2'-O-methyl modified nucleotide with phosphorothioate linkage
  modified_base 3: mod_base = OTHER; note = 2'-O-methyl modified nucleotide with phosphorothioate linkage
  modified_base 29: mod_base = OTHER; note = 2'-O-methyl modified nucleotide
  modified_base 30: mod_base = OTHER; note = 2'-O-methyl modified nucleotide
  modified_base 31: mod_base = OTHER; note = 2'-O-methyl modified nucleotide
  modified_base 32: mod_base = OTHER; note = 2'-O-methyl modified nucleotide
  modified_base 33: mod_base = OTHER; note = 2'-O-methyl modified nucleotide
  modified_base 34: mod_base = OTHER; note = 2'-O-methyl modified nucleotide
  modified_base 35: mod_base = OTHER; note = 2'-O-methyl modified nucleotide
  modified_base 36: mod_base = OTHER; note = 2'-O-methyl modified nucleotide
  modified_base 37: mod_base = OTHER; note = 2'-O-methyl modified nucleotide
  modified_base 38: mod_base = OTHER; note = 2'-O-methyl modified nucleotide
  modified_base 39: mod_base = OTHER; note = 2'-O-methyl modified nucleotide
  modified_base 40: mod_base = OTHER; note = 2'-O-methyl modified nucleotide
  modified_base 69: mod_base = OTHER; note = 2'-O-methyl modified nucleotide
  modified_base 70: mod_base = OTHER; note = 2'-O-methyl modified nucleotide
  modified_base 71: mod_base = OTHER; note = 2'-O-methyl modified nucleotide
  modified_base 72: mod_base = OTHER; note = 2'-O-methyl modified nucleotide
  modified_base 73: mod_base = OTHER; note = 2'-O-methyl modified nucleotide
  modified_base 74: mod_base = OTHER; note = 2'-O-methyl modified nucleotide
  modified_base 75: mod_base = OTHER; note = 2'-O-methyl modified nucleotide
  modified_base 76: mod_base = OTHER; note = 2'-O-methyl modified nucleotide
  modified_base 77: mod_base = OTHER; note = 2'-O-methyl modified nucleotide
  modified_base 78: mod_base = OTHER; note = 2'-O-methyl modified nucleotide
  modified_base 79: mod_base = OTHER; note = 2'-O-methyl modified nucleotide
  modified_base 80: mod_base = OTHER; note = 2'-O-methyl modified nucleotide
  modified_base 81: mod_base = OTHER; note = 2'-O-methyl modified nucleotide
  modified_base 82: mod_base = OTHER; note = 2'-O-methyl modified nucleotide
  modified_base 83: mod_base = OTHER; note = 2'-O-methyl modified nucleotide
  modified_base 84: mod_base = OTHER; note = 2'-O-methyl modified nucleotide
  modified_base 85: mod_base = OTHER; note = 2'-O-methyl modified nucleotide
  modified_base 86: mod_base = OTHER; note = 2'-O-methyl modified nucleotide
  modified_base 87: mod_base = OTHER; note = 2'-O-methyl modified nucleotide
  modified_base 88: mod_base = OTHER; note = 2'-O-methyl modified nucleotide
  modified_base 89: mod_base = OTHER; note = 2'-O-methyl modified nucleotide
  modified_base 90: mod_base = OTHER; note = 2'-O-methyl modified nucleotide
  modified_base 91: mod_base = OTHER; note = 2'-O-methyl modified nucleotide
  modified_base 92: mod_base = OTHER; note = 2'-O-methyl modified nucleotide
  modified_base 93: mod_base = OTHER; note = 2'-O-methyl modified nucleotide
  modified_base 94: mod_base = OTHER; note = 2'-O-methyl modified nucleotide
  modified_base 95: mod_base = OTHER; note = 2'-O-methyl modified nucleotide
  modified_base 96: mod_base = OTHER; note = 2'-O-methyl modified nucleotide
  modified_base 97: mod_base = OTHER; note = 2'-O-methyl modified nucleotide with phosphorothioate linkage
  modified_base 98: mod_base = OTHER; note = 2'-O-methyl modified nucleotide with phosphorothioate linkage
  modified_base 99: mod_base = OTHER; note = 2'-O-methyl modified nucleotide with phosphorothioate linkage
  modified_base 100: mod_base = OTHER; note = 2'-O-methyl modified nucleotide

SEQ ID NO: 84 - RNA, 100 nt, synthetic construct; identical to SEQ ID NO: 52
  source 1..100: mol_type = other RNA; note = Description of Artificial Sequence: Synthetic polynucleotide
  modified_base 1: mod_base = OTHER; note = 2'-O-methyl modified nucleotide with phosphorothioate linkage
  modified_base 2: mod_base = OTHER; note = 2'-O-methyl modified nucleotide with phosphorothioate linkage
  modified_base 3: mod_base = OTHER; note = 2'-O-methyl modified nucleotide with phosphorothioate linkage
  modified_base 29: mod_base = OTHER; note = 2'-O-methyl modified nucleotide
  modified_base 30: mod_base = OTHER; note = 2'-O-methyl modified nucleotide
  modified_base 31: mod_base = OTHER; note = 2'-O-methyl modified nucleotide
  modified_base 32: mod_base = OTHER; note = 2'-O-methyl modified nucleotide
  modified_base 33: mod_base = OTHER; note = 2'-O-methyl modified nucleotide
  modified_base 34: mod_base = OTHER; note = 2'-O-methyl modified nucleotide
  modified_base 35: mod_base = OTHER; note = 2'-O-methyl modified nucleotide
  modified_base 36: mod_base = OTHER; note = 2'-O-methyl modified nucleotide
  modified_base 37: mod_base = OTHER; note = 2'-O-methyl modified nucleotide
  modified_base 38: mod_base = OTHER; note = 2'-O-methyl modified nucleotide
  modified_base 39: mod_base = OTHER; note = 2'-O-methyl modified nucleotide
  modified_base 40: mod_base = OTHER; note = 2'-O-methyl modified nucleotide
  modified_base 69: mod_base = OTHER; note = 2'-O-methyl modified nucleotide
  modified_base 70: mod_base = OTHER; note = 2'-O-methyl modified nucleotide
  modified_base 71: mod_base = OTHER; note = 2'-O-methyl modified nucleotide
  modified_base 72: mod_base = OTHER; note = 2'-O-methyl modified nucleotide
  modified_base 73: mod_base = OTHER; note = 2'-O-methyl modified nucleotide
  modified_base 74: mod_base = OTHER; note = 2'-O-methyl modified nucleotide
  modified_base 75: mod_base = OTHER; note = 2'-O-methyl modified nucleotide
  modified_base 76: mod_base = OTHER; note = 2'-O-methyl modified nucleotide
  modified_base 77: mod_base = OTHER; note = 2'-O-methyl modified nucleotide
  modified_base 78: mod_base = OTHER; note = 2'-O-methyl modified nucleotide
  modified_base 79: mod_base = OTHER; note = 2'-O-methyl modified nucleotide
  modified_base 80: mod_base = OTHER; note = 2'-O-methyl modified nucleotide
  modified_base 81: mod_base = OTHER; note = 2'-O-methyl modified nucleotide
  modified_base 82: mod_base = OTHER; note = 2'-O-methyl modified nucleotide
  modified_base 83: mod_base = OTHER; note = 2'-O-methyl modified nucleotide
  modified_base 84: mod_base = OTHER; note = 2'-O-methyl modified nucleotide
  modified_base 85: mod_base = OTHER; note = 2'-O-methyl modified nucleotide
  modified_base 86: mod_base = OTHER; note = 2'-O-methyl modified nucleotide
  modified_base 87: mod_base = OTHER; note = 2'-O-methyl modified nucleotide
  modified_base 88: mod_base = OTHER; note = 2'-O-methyl modified nucleotide
  modified_base 89: mod_base = OTHER; note = 2'-O-methyl modified nucleotide
  modified_base 90: mod_base = OTHER; note = 2'-O-methyl modified nucleotide
  modified_base 91: mod_base = OTHER; note = 2'-O-methyl modified nucleotide
  modified_base 92: mod_base = OTHER; note = 2'-O-methyl modified nucleotide
  modified_base 93: mod_base = OTHER; note = 2'-O-methyl modified nucleotide
  modified_base 94: mod_base = OTHER; note = 2'-O-methyl modified nucleotide
  modified_base 95: mod_base = OTHER; note = 2'-O-methyl modified nucleotide
  modified_base 96: mod_base = OTHER; note = 2'-O-methyl modified nucleotide
  modified_base 97: mod_base = OTHER; note = 2'-O-methyl modified nucleotide with phosphorothioate linkage
  modified_base 98: mod_base = OTHER; note = 2'-O-methyl modified nucleotide with phosphorothioate linkage
  modified_base 99: mod_base = OTHER; note = 2'-O-methyl modified nucleotide with phosphorothioate linkage
  modified_base 100: mod_base = OTHER; note = 2'-O-methyl modified nucleotide

SEQ ID NO: 85 - RNA, 100 nt, synthetic construct; identical to SEQ ID NO: 53
  source 1..100: mol_type = other RNA; note = Description of Artificial Sequence: Synthetic polynucleotide
  modified_base 1: mod_base = OTHER; note = 2'-O-methyl modified nucleotide with phosphorothioate linkage
  modified_base 2: mod_base = OTHER; note = 2'-O-methyl modified nucleotide with phosphorothioate linkage
  modified_base 3: mod_base = OTHER; note = 2'-O-methyl modified nucleotide with phosphorothioate linkage
  modified_base 29: mod_base = OTHER; note = 2'-O-methyl modified nucleotide
  modified_base 30: mod_base = OTHER; note = 2'-O-methyl modified nucleotide
  modified_base 31: mod_base = OTHER; note = 2'-O-methyl modified nucleotide
  modified_base 32: mod_base = OTHER; note = 2'-O-methyl modified nucleotide
  modified_base 33: mod_base = OTHER; note = 2'-O-methyl modified nucleotide
  modified_base 34: mod_base = OTHER; note = 2'-O-methyl modified nucleotide
  modified_base 35: mod_base = OTHER; note = 2'-O-methyl modified nucleotide
  modified_base 36: mod_base = OTHER; note = 2'-O-methyl modified nucleotide
  modified_base 37: mod_base = OTHER; note = 2'-O-methyl modified nucleotide
  modified_base 38: mod_base = OTHER; note = 2'-O-methyl modified nucleotide
  modified_base 39: mod_base = OTHER; note = 2'-O-methyl modified nucleotide
  modified_base 40: mod_base = OTHER; note = 2'-O-methyl modified nucleotide
  modified_base 69: mod_base = OTHER; note = 2'-O-methyl modified nucleotide
  modified_base 70: mod_base = OTHER; note = 2'-O-methyl modified nucleotide
  modified_base 71: mod_base = OTHER; note = 2'-O-methyl modified nucleotide
  modified_base 72: mod_base = OTHER; note = 2'-O-methyl modified nucleotide
  modified_base 73: mod_base = OTHER; note = 2'-O-methyl modified nucleotide
  modified_base 74: mod_base = OTHER; note = 2'-O-methyl modified nucleotide
  modified_base 75: mod_base = OTHER; note = 2'-O-methyl modified nucleotide
  modified_base 76: mod_base = OTHER; note = 2'-O-methyl modified nucleotide
  modified_base 77: mod_base = OTHER; note = 2'-O-methyl modified nucleotide
  modified_base 78: mod_base = OTHER; note = 2'-O-methyl modified nucleotide
  modified_base 79: mod_base = OTHER; note = 2'-O-methyl modified nucleotide
  modified_base 80: mod_base = OTHER; note = 2'-O-methyl modified nucleotide
  modified_base 81: mod_base = OTHER; note = 2'-O-methyl modified nucleotide
  modified_base 82: mod_base = OTHER; note = 2'-O-methyl modified nucleotide
  modified_base 83: mod_base = OTHER; note = 2'-O-methyl modified nucleotide
  modified_base 84: mod_base = OTHER; note = 2'-O-methyl modified nucleotide
  modified_base 85: mod_base = OTHER; note = 2'-O-methyl modified nucleotide
  modified_base 86: mod_base = OTHER; note = 2'-O-methyl modified nucleotide
  modified_base 87: mod_base = OTHER; note = 2'-O-methyl modified nucleotide
  modified_base 88: mod_base = OTHER; note = 2'-O-methyl modified nucleotide
  modified_base 89: mod_base = OTHER; note = 2'-O-methyl modified nucleotide
  modified_base 90: mod_base = OTHER; note = 2'-O-methyl modified nucleotide
  modified_base 91: mod_base = OTHER; note = 2'-O-methyl modified nucleotide
  modified_base 92: mod_base = OTHER; note = 2'-O-methyl modified nucleotide
  modified_base 93: mod_base = OTHER; note = 2'-O-methyl modified nucleotide
  modified_base 94: mod_base = OTHER; note = 2'-O-methyl modified nucleotide
  modified_base 95: mod_base = OTHER; note = 2'-O-methyl modified nucleotide
  modified_base 96: mod_base = OTHER; note = 2'-O-methyl modified nucleotide
  modified_base 97: mod_base = OTHER; note = 2'-O-methyl modified nucleotide with phosphorothioate linkage
  modified_base 98: mod_base = OTHER; note = 2'-O-methyl modified nucleotide with phosphorothioate linkage
  modified_base 99: mod_base = OTHER; note = 2'-O-methyl modified nucleotide with phosphorothioate linkage
  modified_base 100: mod_base = OTHER; note = 2'-O-methyl modified nucleotide

SEQ ID NO: 86 - RNA, 100 nt, synthetic construct; identical to SEQ ID NO: 54
  source 1..100: mol_type = other RNA; note = Description of Artificial Sequence: Synthetic polynucleotide
  modified_base 1: mod_base = OTHER; note = 2'-O-methyl modified nucleotide with phosphorothioate linkage
  modified_base 2: mod_base = OTHER; note = 2'-O-methyl modified nucleotide with phosphorothioate linkage
  modified_base 3: mod_base = OTHER; note = 2'-O-methyl modified nucleotide with phosphorothioate linkage
  modified_base 29: mod_base = OTHER; note = 2'-O-methyl modified nucleotide
  modified_base 30: mod_base = OTHER; note = 2'-O-methyl modified nucleotide
  modified_base 31: mod_base = OTHER; note = 2'-O-methyl modified nucleotide
  modified_base 32: mod_base = OTHER; note = 2'-O-methyl modified nucleotide
  modified_base 33: mod_base = OTHER; note = 2'-O-methyl modified nucleotide
  modified_base 34: mod_base = OTHER; note = 2'-O-methyl modified nucleotide
  modified_base 35: mod_base = OTHER; note = 2'-O-methyl modified nucleotide
  modified_base 36: mod_base = OTHER; note = 2'-O-methyl modified nucleotide
  modified_base 37: mod_base = OTHER; note = 2'-O-methyl modified nucleotide
  modified_base 38: mod_base = OTHER; note = 2'-O-methyl modified nucleotide
  modified_base 39: mod_base = OTHER; note = 2'-O-methyl modified nucleotide
  modified_base 40: mod_base = OTHER; note = 2'-O-methyl modified nucleotide
  modified_base 69: mod_base = OTHER; note = 2'-O-methyl modified nucleotide
  modified_base 70: mod_base = OTHER; note = 2'-O-methyl modified nucleotide
  modified_base 71: mod_base = OTHER; note = 2'-O-methyl modified nucleotide
  modified_base 72: mod_base = OTHER; note = 2'-O-methyl modified nucleotide
  modified_base 73: mod_base = OTHER; note = 2'-O-methyl modified nucleotide
  modified_base 74: mod_base = OTHER; note = 2'-O-methyl modified nucleotide
  modified_base 75: mod_base = OTHER; note = 2'-O-methyl modified nucleotide
  modified_base 76: mod_base = OTHER; note = 2'-O-methyl modified nucleotide
  modified_base 77: mod_base = OTHER; note = 2'-O-methyl modified nucleotide
  modified_base 78: mod_base = OTHER; note = 2'-O-methyl modified nucleotide
  modified_base 79: mod_base = OTHER; note = 2'-O-methyl modified nucleotide
  modified_base 80: mod_base = OTHER; note = 2'-O-methyl modified nucleotide
  modified_base 81: mod_base = OTHER; note = 2'-O-methyl modified nucleotide
  modified_base 82: mod_base = OTHER; note = 2'-O-methyl modified nucleotide
  modified_base 83: mod_base = OTHER; note = 2'-O-methyl modified nucleotide
  modified_base 84: mod_base = OTHER; note = 2'-O-methyl modified nucleotide
  modified_base 85: mod_base = OTHER; note = 2'-O-methyl modified nucleotide
  modified_base 86: mod_base = OTHER; note = 2'-O-methyl modified nucleotide
  modified_base 87: mod_base = OTHER; note = 2'-O-methyl modified nucleotide
  modified_base 88: mod_base = OTHER; note = 2'-O-methyl modified nucleotide
  modified_base 89: mod_base = OTHER; note = 2'-O-methyl modified nucleotide
  modified_base 90: mod_base = OTHER; note = 2'-O-methyl modified nucleotide
  modified_base 91: mod_base = OTHER; note = 2'-O-methyl modified nucleotide
  modified_base 92: mod_base = OTHER; note = 2'-O-methyl modified nucleotide
  modified_base 93: mod_base = OTHER; note = 2'-O-methyl modified nucleotide
  modified_base 94: mod_base = OTHER; note = 2'-O-methyl modified nucleotide
  modified_base 95: mod_base = OTHER; note = 2'-O-methyl modified nucleotide
  modified_base 96: mod_base = OTHER; note = 2'-O-methyl modified nucleotide
  modified_base 97: mod_base = OTHER; note = 2'-O-methyl modified nucleotide with phosphorothioate linkage
  modified_base 98: mod_base = OTHER; note = 2'-O-methyl modified nucleotide with phosphorothioate linkage
  modified_base 99: mod_base = OTHER; note = 2'-O-methyl modified nucleotide with phosphorothioate linkage
  modified_base 100: mod_base = OTHER; note = 2'-O-methyl modified nucleotide

SEQ ID NO: 87 - RNA, 100 nt, synthetic construct; identical to SEQ ID NO: 55
  source 1..100: mol_type = other RNA; note = Description of Artificial Sequence: Synthetic polynucleotide
  modified_base 1: mod_base = OTHER; note = 2'-O-methyl modified nucleotide with phosphorothioate linkage
  modified_base 2: mod_base = OTHER; note = 2'-O-methyl modified nucleotide with phosphorothioate linkage
  modified_base 3: mod_base = OTHER; note = 2'-O-methyl modified nucleotide with phosphorothioate linkage
  modified_base 29: mod_base = OTHER; note = 2'-O-methyl modified nucleotide
  modified_base 30: mod_base = OTHER; note = 2'-O-methyl modified nucleotide
  modified_base 31: mod_base = OTHER; note = 2'-O-methyl modified nucleotide
  modified_base 32: mod_base = OTHER; note = 2'-O-methyl modified nucleotide
  modified_base 33: mod_base = OTHER; note = 2'-O-methyl modified nucleotide
  modified_base 34: mod_base = OTHER; note = 2'-O-methyl modified nucleotide
  modified_base 35: mod_base = OTHER; note = 2'-O-methyl modified nucleotide
  modified_base 36: mod_base = OTHER; note = 2'-O-methyl modified nucleotide
  modified_base 37: mod_base = OTHER; note = 2'-O-methyl modified nucleotide
  modified_base 38: mod_base = OTHER; note = 2'-O-methyl modified nucleotide
  modified_base 39: mod_base = OTHER; note = 2'-O-methyl modified nucleotide
  modified_base 40: mod_base = OTHER; note = 2'-O-methyl modified nucleotide
  modified_base 69: mod_base = OTHER; note = 2'-O-methyl modified nucleotide
  modified_base 70: mod_base = OTHER; note = 2'-O-methyl modified nucleotide
  modified_base 71: mod_base = OTHER; note = 2'-O-methyl modified nucleotide
  modified_base 72: mod_base = OTHER; note = 2'-O-methyl modified nucleotide
  modified_base 73: mod_base = OTHER; note = 2'-O-methyl modified nucleotide
  modified_base 74: mod_base = OTHER; note = 2'-O-methyl modified nucleotide
  modified_base 75: mod_base = OTHER; note = 2'-O-methyl modified nucleotide
  modified_base 76: mod_base = OTHER; note = 2'-O-methyl modified nucleotide
  modified_base 77: mod_base = OTHER; note = 2'-O-methyl modified nucleotide
  modified_base 78: mod_base = OTHER; note = 2'-O-methyl modified nucleotide
  modified_base 79: mod_base = OTHER; note = 2'-O-methyl modified nucleotide
  modified_base 80: mod_base = OTHER; note = 2'-O-methyl modified nucleotide
  modified_base 81: mod_base = OTHER; note = 2'-O-methyl modified nucleotide
  modified_base 82: mod_base = OTHER; note = 2'-O-methyl modified nucleotide
  modified_base 83: mod_base = OTHER; note = 2'-O-methyl modified nucleotide
  modified_base 84: mod_base = OTHER; note = 2'-O-methyl modified nucleotide
  modified_base 85: mod_base = OTHER; note = 2'-O-methyl modified nucleotide
  modified_base 86: mod_base = OTHER; note = 2'-O-methyl modified nucleotide
  modified_base 87: mod_base = OTHER; note = 2'-O-methyl modified nucleotide
  modified_base 88: mod_base = OTHER; note = 2'-O-methyl modified nucleotide
  modified_base 89: mod_base = OTHER; note = 2'-O-methyl modified nucleotide
  modified_base 90: mod_base = OTHER; note = 2'-O-methyl modified nucleotide
  modified_base 91: mod_base = OTHER; note = 2'-O-methyl modified nucleotide
  modified_base 92: mod_base = OTHER; note = 2'-O-methyl modified nucleotide
  modified_base 93: mod_base = OTHER; note = 2'-O-methyl modified nucleotide
  modified_base 94: mod_base = OTHER; note = 2'-O-methyl modified nucleotide
  modified_base 95: mod_base = OTHER; note = 2'-O-methyl modified nucleotide
  modified_base 96: mod_base = OTHER; note = 2'-O-methyl modified nucleotide
  modified_base 97: mod_base = OTHER; note = 2'-O-methyl modified nucleotide with phosphorothioate linkage
  modified_base 98: mod_base = OTHER; note = 2'-O-methyl modified nucleotide with phosphorothioate linkage
  modified_base 99: mod_base = OTHER; note = 2'-O-methyl modified nucleotide with phosphorothioate linkage
  modified_base 100: mod_base = OTHER; note = 2'-O-methyl modified nucleotide

SEQ ID NO: 88 - RNA, 100 nt, synthetic construct; identical to SEQ ID NO: 56
  source 1..100: mol_type = other RNA; note = Description of Artificial Sequence: Synthetic polynucleotide
  modified_base 1: mod_base = OTHER; note = 2'-O-methyl modified nucleotide with phosphorothioate linkage
  modified_base 2: mod_base = OTHER; note = 2'-O-methyl modified nucleotide with phosphorothioate linkage
  modified_base 3: mod_base = OTHER; note = 2'-O-methyl modified nucleotide with phosphorothioate linkage
  modified_base 29: mod_base = OTHER; note = 2'-O-methyl modified nucleotide
  modified_base 30: mod_base = OTHER; note = 2'-O-methyl modified nucleotide
  modified_base 31: mod_base = OTHER; note = 2'-O-methyl modified nucleotide
  modified_base 32: mod_base = OTHER; note = 2'-O-methyl modified nucleotide
  modified_base 33: mod_base = OTHER; note = 2'-O-methyl modified nucleotide
  modified_base 34: mod_base = OTHER; note = 2'-O-methyl modified nucleotide
  modified_base 35: mod_base = OTHER; note = 2'-O-methyl modified nucleotide
  modified_base 36: mod_base = OTHER; note = 2'-O-methyl modified nucleotide
  modified_base 37: mod_base = OTHER; note = 2'-O-methyl modified nucleotide
  modified_base 38: mod_base = OTHER; note = 2'-O-methyl modified nucleotide
  modified_base 39: mod_base = OTHER; note = 2'-O-methyl modified nucleotide
  modified_base 40: mod_base = OTHER; note = 2'-O-methyl modified nucleotide
  modified_base 69: mod_base = OTHER; note = 2'-O-methyl modified nucleotide
  modified_base 70: mod_base = OTHER; note = 2'-O-methyl modified nucleotide
  modified_base 71: mod_base = OTHER; note = 2'-O-methyl modified nucleotide
  modified_base 72: mod_base = OTHER; note = 2'-O-methyl modified nucleotide
  modified_base 73: mod_base = OTHER; note = 2'-O-methyl modified nucleotide
  modified_base 74: mod_base = OTHER; note = 2'-O-methyl modified nucleotide
  modified_base 75: mod_base = OTHER; note = 2'-O-methyl modified nucleotide
  modified_base 76: mod_base = OTHER; note = 2'-O-methyl modified nucleotide
  modified_base 77: mod_base = OTHER; note = 2'-O-methyl modified nucleotide
  modified_base 78: mod_base = OTHER; note = 2'-O-methyl modified nucleotide
  modified_base 79: mod_base = OTHER; note = 2'-O-methyl modified nucleotide
  modified_base 80: mod_base = OTHER; note = 2'-O-methyl modified nucleotide
  modified_base 81: mod_base = OTHER; note = 2'-O-methyl modified nucleotide
  modified_base 82: mod_base = OTHER; note = 2'-O-methyl modified nucleotide
  modified_base 83: mod_base = OTHER; note = 2'-O-methyl modified nucleotide
  modified_base 84: mod_base = OTHER; note = 2'-O-methyl modified nucleotide
  modified_base 85: mod_base = OTHER; note = 2'-O-methyl modified nucleotide
  modified_base 86: mod_base = OTHER; note = 2'-O-methyl modified nucleotide
  modified_base 87: mod_base = OTHER; note = 2'-O-methyl modified nucleotide
  modified_base 88: mod_base = OTHER; note = 2'-O-methyl modified nucleotide
  modified_base 89: mod_base = OTHER; note = 2'-O-methyl modified nucleotide
  modified_base 90: mod_base = OTHER; note = 2'-O-methyl modified nucleotide
  modified_base 91: mod_base = OTHER; note = 2'-O-methyl modified nucleotide
  modified_base 92: mod_base = OTHER; note = 2'-O-methyl modified nucleotide
  modified_base 93: mod_base = OTHER; note = 2'-O-methyl modified nucleotide
  modified_base 94: mod_base = OTHER; note = 2'-O-methyl modified nucleotide
  modified_base 95: mod_base = OTHER; note = 2'-O-methyl modified nucleotide
  modified_base 96: mod_base = OTHER; note = 2'-O-methyl modified nucleotide
  modified_base 97: mod_base = OTHER; note = 2'-O-methyl modified nucleotide with phosphorothioate linkage
  modified_base 98: mod_base = OTHER; note = 2'-O-methyl modified nucleotide with phosphorothioate linkage
  modified_base 99: mod_base = OTHER; note = 2'-O-methyl modified nucleotide with phosphorothioate linkage
  modified_base 100: mod_base = OTHER; note = 2'-O-methyl modified nucleotide

SEQ ID NO: 89 - RNA, 100 nt, synthetic construct; identical to SEQ ID NO: 57
  source 1..100: mol_type = other RNA; note = Description of Artificial Sequence: Synthetic polynucleotide
  modified_base 1: mod_base = OTHER; note = 2'-O-methyl modified nucleotide with phosphorothioate linkage
  modified_base 2: mod_base = OTHER; note = 2'-O-methyl modified nucleotide with phosphorothioate linkage
  modified_base 3: mod_base = OTHER; note = 2'-O-methyl modified nucleotide with phosphorothioate linkage
  modified_base 29: mod_base = OTHER; note = 2'-O-methyl modified nucleotide
  modified_base 30: mod_base = OTHER; note = 2'-O-methyl modified nucleotide
  modified_base 31: mod_base = OTHER; note = 2'-O-methyl modified nucleotide
  modified_base 32: mod_base = OTHER; note = 2'-O-methyl modified nucleotide
  modified_base 33: mod_base = OTHER; note = 2'-O-methyl modified nucleotide
  modified_base 34: mod_base = OTHER; note = 2'-O-methyl modified nucleotide
  modified_base 35: mod_base = OTHER; note = 2'-O-methyl modified nucleotide
  modified_base 36: mod_base = OTHER; note = 2'-O-methyl modified nucleotide
  modified_base 37: mod_base = OTHER; note = 2'-O-methyl modified nucleotide
  modified_base 38: mod_base = OTHER; note = 2'-O-methyl modified nucleotide
  modified_base 39: mod_base = OTHER; note = 2'-O-methyl modified nucleotide
  modified_base 40: mod_base = OTHER; note = 2'-O-methyl modified nucleotide
  modified_base 69: mod_base = OTHER; note = 2'-O-methyl modified nucleotide
  modified_base 70: mod_base = OTHER; note = 2'-O-methyl modified nucleotide
  modified_base 71: mod_base = OTHER; note = 2'-O-methyl modified nucleotide
  modified_base 72: mod_base = OTHER; note = 2'-O-methyl modified nucleotide
  modified_base 73: mod_base = OTHER; note = 2'-O-methyl modified nucleotide
  modified_base 74: mod_base = OTHER; note = 2'-O-methyl modified nucleotide
  modified_base 75: mod_base = OTHER; note = 2'-O-methyl modified nucleotide
  modified_base 76: mod_base = OTHER; note = 2'-O-methyl modified nucleotide
  modified_base 77: mod_base = OTHER; note = 2'-O-methyl modified nucleotide
  modified_base 78: mod_base = OTHER; note = 2'-O-methyl modified nucleotide
  modified_base 79: mod_base = OTHER; note = 2'-O-methyl modified nucleotide
  modified_base 80: mod_base = OTHER; note = 2'-O-methyl modified nucleotide
  modified_base 81: mod_base = OTHER; note = 2'-O-methyl modified nucleotide
  modified_base 82: mod_base = OTHER; note = 2'-O-methyl modified nucleotide
  modified_base 83: mod_base = OTHER; note = 2'-O-methyl modified nucleotide
  modified_base 84: mod_base = OTHER; note = 2'-O-methyl modified nucleotide
  modified_base 85: mod_base = OTHER; note = 2'-O-methyl modified nucleotide
  modified_base 86: mod_base = OTHER; note = 2'-O-methyl modified nucleotide
  modified_base 87: mod_base = OTHER; note = 2'-O-methyl modified nucleotide
  modified_base 88: mod_base = OTHER; note = 2'-O-methyl modified nucleotide
  modified_base 89: mod_base = OTHER; note = 2'-O-methyl modified nucleotide
  modified_base 90: mod_base = OTHER; note = 2'-O-methyl modified nucleotide
  modified_base 91: mod_base = OTHER; note = 2'-O-methyl modified nucleotide
  modified_base 92: mod_base = OTHER; note = 2'-O-methyl modified nucleotide
  modified_base 93: mod_base = OTHER; note = 2'-O-methyl modified nucleotide
  modified_base 94: mod_base = OTHER; note = 2'-O-methyl modified nucleotide
  modified_base 95: mod_base = OTHER; note = 2'-O-methyl modified nucleotide
  modified_base 96: mod_base = OTHER; note = 2'-O-methyl modified nucleotide
  modified_base 97: mod_base = OTHER; note = 2'-O-methyl modified nucleotide with phosphorothioate linkage
  modified_base 98: mod_base = OTHER; note = 2'-O-methyl modified nucleotide with phosphorothioate linkage
  modified_base 99: mod_base = OTHER; note = 2'-O-methyl modified nucleotide with phosphorothioate linkage
  modified_base 100: mod_base = OTHER; note = 2'-O-methyl modified nucleotide

SEQ ID NO: 90 - RNA, 100 nt, synthetic construct; identical to SEQ ID NO: 58
  source 1..100: mol_type = other RNA; note = Description of Artificial Sequence: Synthetic polynucleotide
  modified_base 1: mod_base = OTHER; note = 2'-O-methyl modified nucleotide with phosphorothioate linkage
  modified_base 2: mod_base = OTHER; note = 2'-O-methyl modified nucleotide with phosphorothioate linkage
  modified_base 3: mod_base = OTHER; note = 2'-O-methyl modified nucleotide with phosphorothioate linkage
  modified_base 29: mod_base = OTHER; note = 2'-O-methyl modified nucleotide
  modified_base 30: mod_base = OTHER; note = 2'-O-methyl modified nucleotide
  modified_base 31: mod_base = OTHER; note = 2'-O-methyl modified nucleotide
  modified_base 32: mod_base = OTHER; note = 2'-O-methyl modified nucleotide
  modified_base 33: mod_base = OTHER; note = 2'-O-methyl modified nucleotide
  modified_base 34: mod_base = OTHER; note = 2'-O-methyl modified nucleotide
  modified_base 35: mod_base = OTHER; note = 2'-O-methyl modified nucleotide
  modified_base 36: mod_base = OTHER; note = 2'-O-methyl modified nucleotide
  modified_base 37: mod_base = OTHER; note = 2'-O-methyl modified nucleotide
  modified_base 38: mod_base = OTHER; note = 2'-O-methyl modified nucleotide
  modified_base 39: mod_base = OTHER; note = 2'-O-methyl modified nucleotide
  modified_base 40: mod_base = OTHER; note = 2'-O-methyl modified nucleotide
  modified_base 69: mod_base = OTHER; note = 2'-O-methyl modified nucleotide
  modified_base 70: mod_base = OTHER; note = 2'-O-methyl modified nucleotide
  modified_base 71: mod_base = OTHER; note = 2'-O-methyl modified nucleotide
  modified_base 72: mod_base = OTHER; note = 2'-O-methyl modified nucleotide
  modified_base 73: mod_base = OTHER; note = 2'-O-methyl modified nucleotide
  modified_base 74: mod_base = OTHER; note = 2'-O-methyl modified nucleotide
  modified_base 75: mod_base = OTHER; note = 2'-O-methyl modified nucleotide
  modified_base 76: mod_base = OTHER; note = 2'-O-methyl modified nucleotide
  modified_base 77: mod_base = OTHER; note = 2'-O-methyl modified nucleotide
  modified_base 78: mod_base = OTHER; note = 2'-O-methyl modified nucleotide
  modified_base 79: mod_base = OTHER; note = 2'-O-methyl modified nucleotide
  modified_base 80: mod_base = OTHER; note = 2'-O-methyl modified nucleotide
  modified_base 81: mod_base = OTHER; note = 2'-O-methyl modified nucleotide
  modified_base 82: mod_base = OTHER; note = 2'-O-methyl modified nucleotide
  modified_base 83: mod_base = OTHER; note = 2'-O-methyl modified nucleotide
  modified_base 84: mod_base = OTHER; note = 2'-O-methyl modified nucleotide
  modified_base 85: mod_base = OTHER; note = 2'-O-methyl modified nucleotide
  modified_base 86: mod_base = OTHER; note = 2'-O-methyl modified nucleotide
  modified_base 87: mod_base = OTHER; note = 2'-O-methyl modified nucleotide
  modified_base 88: mod_base = OTHER; note = 2'-O-methyl modified nucleotide
  modified_base 89: mod_base = OTHER; note = 2'-O-methyl modified nucleotide
  modified_base 90: mod_base = OTHER; note = 2'-O-methyl modified nucleotide
  modified_base 91: mod_base = OTHER; note = 2'-O-methyl modified nucleotide
  modified_base 92: mod_base = OTHER; note = 2'-O-methyl modified nucleotide
  modified_base 93: mod_base = OTHER; note = 2'-O-methyl modified nucleotide
  modified_base 94: mod_base = OTHER; note = 2'-O-methyl modified nucleotide
  modified_base 95: mod_base = OTHER; note = 2'-O-methyl modified nucleotide
  modified_base 96: mod_base = OTHER; note = 2'-O-methyl modified nucleotide
  modified_base 97: mod_base = OTHER; note = 2'-O-methyl modified nucleotide with phosphorothioate linkage
  modified_base 98: mod_base = OTHER; note = 2'-O-methyl modified nucleotide with phosphorothioate linkage
  modified_base 99: mod_base = OTHER; note = 2'-O-methyl modified nucleotide with phosphorothioate linkage
  modified_base 100: mod_base = OTHER; note = 2'-O-methyl modified nucleotide

SEQ ID NO: 91 - RNA, 100 nt, synthetic construct; identical to SEQ ID NO: 59
  source 1..100: mol_type = other RNA; note = Description of Artificial Sequence: Synthetic polynucleotide
  modified_base 1: mod_base = OTHER; note = 2'-O-methyl modified nucleotide with phosphorothioate linkage
  modified_base 2: mod_base = OTHER; note = 2'-O-methyl modified nucleotide with phosphorothioate linkage
  modified_base 3: mod_base = OTHER; note = 2'-O-methyl modified nucleotide with phosphorothioate linkage
  modified_base 29: mod_base = OTHER; note = 2'-O-methyl modified nucleotide
  modified_base 30: mod_base = OTHER; note = 2'-O-methyl modified nucleotide
  modified_base 31: mod_base = OTHER; note = 2'-O-methyl modified nucleotide
  modified_base 32: mod_base = OTHER; note = 2'-O-methyl modified nucleotide
  modified_base 33: mod_base = OTHER; note = 2'-O-methyl modified nucleotide
  modified_base 34: mod_base = OTHER; note = 2'-O-methyl modified nucleotide
  modified_base 35: mod_base = OTHER; note = 2'-O-methyl modified nucleotide
  modified_base 36: mod_base = OTHER; note = 2'-O-methyl modified nucleotide
  modified_base 37: mod_base = OTHER; note = 2'-O-methyl modified nucleotide
  modified_base 38: mod_base = OTHER; note = 2'-O-methyl modified nucleotide
  modified_base 39: mod_base = OTHER; note = 2'-O-methyl modified nucleotide
  modified_base 40: mod_base = OTHER; note = 2'-O-methyl modified nucleotide
  modified_base 69: mod_base = OTHER; note = 2'-O-methyl modified nucleotide
  modified_base 70: mod_base = OTHER; note = 2'-O-methyl modified nucleotide
  modified_base 71: mod_base = OTHER; note = 2'-O-methyl modified nucleotide
  modified_base 72: mod_base = OTHER; note = 2'-O-methyl modified nucleotide
  modified_base 73: mod_base = OTHER; note = 2'-O-methyl modified nucleotide
  modified_base 74: mod_base = OTHER; note = 2'-O-methyl modified nucleotide
  modified_base 75: mod_base = OTHER; note = 2'-O-methyl modified nucleotide
  modified_base 76: mod_base = OTHER; note = 2'-O-methyl modified nucleotide
  modified_base 77: mod_base = OTHER; note = 2'-O-methyl modified nucleotide
  modified_base 78: mod_base = OTHER; note = 2'-O-methyl modified nucleotide
  modified_base 79: mod_base = OTHER; note = 2'-O-methyl modified nucleotide
  modified_base 80: mod_base = OTHER; note = 2'-O-methyl modified nucleotide
  modified_base 81: mod_base = OTHER; note = 2'-O-methyl modified nucleotide
  modified_base 82: mod_base = OTHER; note = 2'-O-methyl modified nucleotide
  modified_base 83: mod_base = OTHER; note = 2'-O-methyl modified nucleotide
  modified_base 84: mod_base = OTHER; note = 2'-O-methyl modified nucleotide
  modified_base 85: mod_base = OTHER; note = 2'-O-methyl modified nucleotide
  modified_base 86: mod_base = OTHER; note = 2'-O-methyl modified nucleotide
  modified_base 87: mod_base = OTHER; note = 2'-O-methyl modified nucleotide
  modified_base 88: mod_base = OTHER; note = 2'-O-methyl modified nucleotide
  modified_base 89: mod_base = OTHER; note = 2'-O-methyl modified nucleotide
  modified_base 90: mod_base = OTHER; note = 2'-O-methyl modified nucleotide
  modified_base 91: mod_base = OTHER; note = 2'-O-methyl modified nucleotide
  modified_base 92: mod_base = OTHER; note = 2'-O-methyl modified nucleotide
  modified_base 93: mod_base = OTHER; note = 2'-O-methyl modified nucleotide
  modified_base 94: mod_base = OTHER; note = 2'-O-methyl modified nucleotide
  modified_base 95: mod_base = OTHER; note = 2'-O-methyl modified nucleotide
  modified_base 96: mod_base = OTHER; note = 2'-O-methyl modified nucleotide
  modified_base 97: mod_base = OTHER; note = 2'-O-methyl modified nucleotide with phosphorothioate linkage
  modified_base 98: mod_base = OTHER; note = 2'-O-methyl modified nucleotide with phosphorothioate linkage
  modified_base 99: mod_base = OTHER; note = 2'-O-methyl modified nucleotide with phosphorothioate linkage
  modified_base 100: mod_base = OTHER; note = 2'-O-methyl modified nucleotide

SEQ ID NO: 92 - RNA, 100 nt, synthetic construct; identical to SEQ ID NO: 60
  source 1..100: mol_type = other RNA; note = Description of Artificial Sequence: Synthetic polynucleotide
  modified_base 1: mod_base = OTHER; note = 2'-O-methyl modified nucleotide with phosphorothioate linkage
  modified_base 2: mod_base = OTHER; note = 2'-O-methyl modified nucleotide with phosphorothioate linkage
  modified_base 3: mod_base = OTHER; note = 2'-O-methyl modified nucleotide with phosphorothioate linkage
  modified_base 29: mod_base = OTHER; note = 2'-O-methyl modified nucleotide
  modified_base 30: mod_base = OTHER; note = 2'-O-methyl modified nucleotide
  modified_base 31: mod_base = OTHER; note = 2'-O-methyl modified nucleotide
  modified_base 32: mod_base = OTHER; note = 2'-O-methyl modified nucleotide
  modified_base 33: mod_base = OTHER; note = 2'-O-methyl modified nucleotide
  modified_base 34: mod_base = OTHER; note = 2'-O-methyl modified nucleotide
  modified_base 35: mod_base = OTHER; note = 2'-O-methyl modified nucleotide
  modified_base 36: mod_base = OTHER; note = 2'-O-methyl modified nucleotide
  modified_base 37: mod_base = OTHER; note = 2'-O-methyl modified nucleotide
  modified_base 38: mod_base = OTHER; note = 2'-O-methyl modified nucleotide
  modified_base 39: mod_base = OTHER; note = 2'-O-methyl modified nucleotide
  modified_base 40: mod_base = OTHER; note = 2'-O-methyl modified nucleotide
  modified_base 69: mod_base = OTHER; note = 2'-O-methyl modified nucleotide
  modified_base 70: mod_base = OTHER; note = 2'-O-methyl modified nucleotide
  modified_base 71: mod_base = OTHER; note = 2'-O-methyl modified nucleotide
  modified_base 72: mod_base = OTHER; note = 2'-O-methyl modified nucleotide
  modified_base 73: mod_base = OTHER; note = 2'-O-methyl modified nucleotide
  modified_base 74: mod_base = OTHER; note = 2'-O-methyl modified nucleotide
  modified_base 75: mod_base = OTHER; note = 2'-O-methyl modified nucleotide
  modified_base 76: mod_base = OTHER; note = 2'-O-methyl modified nucleotide
  modified_base 77: mod_base = OTHER; note = 2'-O-methyl modified nucleotide
  modified_base 78: mod_base = OTHER; note = 2'-O-methyl modified nucleotide
  modified_base 79: mod_base = OTHER; note = 2'-O-methyl modified nucleotide
  modified_base 80: mod_base = OTHER; note = 2'-O-methyl modified nucleotide
  modified_base 81: mod_base = OTHER; note = 2'-O-methyl modified nucleotide
  modified_base 82: mod_base = OTHER; note = 2'-O-methyl modified nucleotide
  modified_base 83: mod_base = OTHER; note = 2'-O-methyl modified nucleotide
  modified_base 84: mod_base = OTHER; note = 2'-O-methyl modified nucleotide
  modified_base 85: mod_base = OTHER; note = 2'-O-methyl modified nucleotide
  modified_base 86: mod_base = OTHER; note = 2'-O-methyl modified nucleotide
  modified_base 87: mod_base = OTHER; note = 2'-O-methyl modified nucleotide
  modified_base 88: mod_base = OTHER; note = 2'-O-methyl modified nucleotide
  modified_base 89: mod_base = OTHER; note = 2'-O-methyl modified nucleotide
  modified_base 90: mod_base = OTHER; note = 2'-O-methyl modified nucleotide
  modified_base 91: mod_base = OTHER; note = 2'-O-methyl modified nucleotide
  modified_base 92: mod_base = OTHER; note = 2'-O-methyl modified nucleotide
  modified_base 93: mod_base = OTHER; note = 2'-O-methyl modified nucleotide
  modified_base 94: mod_base = OTHER; note = 2'-O-methyl modified nucleotide
  modified_base 95: mod_base = OTHER; note = 2'-O-methyl modified nucleotide
  modified_base 96: mod_base = OTHER; note = 2'-O-methyl modified nucleotide
  modified_base 97: mod_base = OTHER; note = 2'-O-methyl modified nucleotide with phosphorothioate linkage
  modified_base 98: mod_base = OTHER; note = 2'-O-methyl modified nucleotide with phosphorothioate linkage
  modified_base 99: mod_base = OTHER; note = 2'-O-methyl modified nucleotide with phosphorothioate linkage
  modified_base 100: mod_base = OTHER; note = 2'-O-methyl modified nucleotide

SEQ ID NO: 93 - RNA, 100 nt, synthetic construct; identical to SEQ ID NO: 61
  source 1..100: mol_type = other RNA; note = Description of Artificial Sequence: Synthetic polynucleotide
  modified_base 1: mod_base = OTHER; note = 2'-O-methyl modified nucleotide with phosphorothioate linkage
  modified_base 2: mod_base = OTHER; note = 2'-O-methyl modified nucleotide with phosphorothioate linkage
  modified_base 3: mod_base = OTHER; note = 2'-O-methyl modified nucleotide with phosphorothioate linkage
  modified_base 29: mod_base = OTHER; note = 2'-O-methyl modified nucleotide
  modified_base 30: mod_base = OTHER; note = 2'-O-methyl modified nucleotide
  modified_base 31: mod_base = OTHER; note = 2'-O-methyl modified nucleotide
  modified_base 32: mod_base = OTHER; note = 2'-O-methyl modified nucleotide
  modified_base 33: mod_base = OTHER; note = 2'-O-methyl modified nucleotide
  modified_base 34: mod_base = OTHER; note = 2'-O-methyl modified nucleotide
  modified_base 35: mod_base = OTHER; note = 2'-O-methyl modified nucleotide
  modified_base 36: mod_base = OTHER; note = 2'-O-methyl modified nucleotide
  modified_base 37: mod_base = OTHER; note = 2'-O-methyl modified nucleotide
  modified_base 38: mod_base = OTHER; note = 2'-O-methyl modified nucleotide
  modified_base 39: mod_base = OTHER; note = 2'-O-methyl modified nucleotide
  modified_base 40: mod_base = OTHER; note = 2'-O-methyl modified nucleotide
  modified_base 69: mod_base = OTHER; note = 2'-O-methyl modified nucleotide
  modified_base 70: mod_base = OTHER; note = 2'-O-methyl modified nucleotide
  modified_base 71: mod_base = OTHER; note = 2'-O-methyl modified nucleotide
  modified_base 72: mod_base = OTHER; note = 2'-O-methyl modified nucleotide
  modified_base 73: mod_base = OTHER; note = 2'-O-methyl modified nucleotide
  modified_base 74: mod_base = OTHER; note = 2'-O-methyl modified nucleotide
  modified_base 75: mod_base = OTHER; note = 2'-O-methyl modified nucleotide
  modified_base 76: mod_base = OTHER; note = 2'-O-methyl modified nucleotide
  modified_base 77: mod_base = OTHER; note = 2'-O-methyl modified nucleotide
  modified_base 78: mod_base = OTHER; note = 2'-O-methyl modified nucleotide
  modified_base 79: mod_base = OTHER; note = 2'-O-methyl modified nucleotide
  modified_base 80: mod_base = OTHER; note = 2'-O-methyl modified nucleotide
  modified_base 81: mod_base = OTHER; note = 2'-O-methyl modified nucleotide
  modified_base 82: mod_base = OTHER; note = 2'-O-methyl modified nucleotide
  modified_base 83: mod_base = OTHER; note = 2'-O-methyl modified nucleotide
  modified_base 84: mod_base = OTHER; note = 2'-O-methyl modified nucleotide
  modified_base 85: mod_base = OTHER; note = 2'-O-methyl modified nucleotide
  modified_base 86: mod_base = OTHER; note = 2'-O-methyl modified nucleotide
  modified_base 87: mod_base = OTHER; note = 2'-O-methyl modified nucleotide
  modified_base 88: mod_base = OTHER; note = 2'-O-methyl modified nucleotide
  modified_base 89: mod_base = OTHER; note = 2'-O-methyl modified nucleotide
  modified_base 90: mod_base = OTHER; note = 2'-O-methyl modified nucleotide
  modified_base 91: mod_base = OTHER; note = 2'-O-methyl modified nucleotide
  modified_base 92: mod_base = OTHER; note = 2'-O-methyl modified nucleotide
  modified_base 93: mod_base = OTHER; note = 2'-O-methyl modified nucleotide
  modified_base 94: mod_base = OTHER; note = 2'-O-methyl modified nucleotide
  modified_base 95: mod_base = OTHER; note = 2'-O-methyl modified nucleotide
  modified_base 96: mod_base = OTHER; note = 2'-O-methyl modified nucleotide
  modified_base 97: mod_base = OTHER; note = 2'-O-methyl modified nucleotide with phosphorothioate linkage
  modified_base 98: mod_base = OTHER; note = 2'-O-methyl modified nucleotide with phosphorothioate linkage
  modified_base 99: mod_base = OTHER; note = 2'-O-methyl modified nucleotide with phosphorothioate linkage
  modified_base 100: mod_base = OTHER; note = 2'-O-methyl modified nucleotide

SEQ ID NO: 94 - RNA, 100 nt, synthetic construct; identical to SEQ ID NO: 62
  source 1..100: mol_type = other RNA; note = Description of Artificial Sequence: Synthetic polynucleotide
  modified_base 1: mod_base = OTHER; note = 2'-O-methyl modified nucleotide with phosphorothioate linkage
  modified_base 2: mod_base = OTHER; note = 2'-O-methyl modified nucleotide with phosphorothioate linkage
  modified_base 3: mod_base = OTHER; note = 2'-O-methyl modified nucleotide with phosphorothioate linkage
  modified_base 29: mod_base = OTHER; note = 2'-O-methyl modified nucleotide
  modified_base 30: mod_base = OTHER; note = 2'-O-methyl modified nucleotide
  modified_base 31: mod_base = OTHER; note = 2'-O-methyl modified nucleotide
  modified_base 32: mod_base = OTHER; note = 2'-O-methyl modified nucleotide
  modified_base 33: mod_base = OTHER; note = 2'-O-methyl modified nucleotide
  modified_base 34: mod_base = OTHER; note = 2'-O-methyl modified nucleotide
  modified_base 35: mod_base = OTHER; note = 2'-O-methyl modified nucleotide
  modified_base 36: mod_base = OTHER; note = 2'-O-methyl modified nucleotide
  modified_base 37: mod_base = OTHER; note = 2'-O-methyl modified nucleotide
  modified_base 38: mod_base = OTHER; note = 2'-O-methyl modified nucleotide
  modified_base 39: mod_base = OTHER; note = 2'-O-methyl modified nucleotide
  modified_base 40: mod_base = OTHER; note = 2'-O-methyl modified nucleotide
  modified_base 69: mod_base = OTHER; note = 2'-O-methyl modified nucleotide
  modified_base 70: mod_base = OTHER; note = 2'-O-methyl modified nucleotide
  modified_base 71: mod_base = OTHER; note = 2'-O-methyl modified nucleotide
  modified_base 72: mod_base = OTHER; note = 2'-O-methyl modified nucleotide
  modified_base 73: mod_base = OTHER; note = 2'-O-methyl modified nucleotide
  modified_base 74: mod_base = OTHER; note = 2'-O-methyl modified nucleotide
  modified_base 75: mod_base = OTHER; note = 2'-O-methyl modified nucleotide
  modified_base 76: mod_base = OTHER; note = 2'-O-methyl modified nucleotide
  modified_base 77: mod_base = OTHER; note = 2'-O-methyl modified nucleotide
  modified_base 78: mod_base = OTHER; note = 2'-O-methyl modified nucleotide
  modified_base 79: mod_base = OTHER; note = 2'-O-methyl modified nucleotide
  modified_base 80: mod_base = OTHER; note = 2'-O-methyl modified nucleotide
  modified_base 81: mod_base = OTHER; note = 2'-O-methyl modified nucleotide
  modified_base 82: mod_base = OTHER; note = 2'-O-methyl modified nucleotide
  modified_base 83: mod_base = OTHER; note = 2'-O-methyl modified nucleotide
  modified_base 84: mod_base = OTHER; note = 2'-O-methyl modified nucleotide
  modified_base 85: mod_base = OTHER; note = 2'-O-methyl modified nucleotide
  modified_base 86: mod_base = OTHER; note = 2'-O-methyl modified nucleotide
  modified_base 87: mod_base = OTHER; note = 2'-O-methyl modified nucleotide
  modified_base 88: mod_base = OTHER; note = 2'-O-methyl modified nucleotide
  modified_base 89: mod_base = OTHER; note = 2'-O-methyl modified nucleotide
  modified_base 90: mod_base = OTHER; note = 2'-O-methyl modified nucleotide
  modified_base 91: mod_base = OTHER; note = 2'-O-methyl modified nucleotide
  modified_base 92: mod_base = OTHER; note = 2'-O-methyl modified nucleotide
  modified_base 93: mod_base = OTHER; note = 2'-O-methyl modified nucleotide
  modified_base 94: mod_base = OTHER; note = 2'-O-methyl modified nucleotide
  modified_base 95: mod_base = OTHER; note = 2'-O-methyl modified nucleotide
  modified_base 96: mod_base = OTHER; note = 2'-O-methyl modified nucleotide
  modified_base 97: mod_base = OTHER; note = 2'-O-methyl modified nucleotide with phosphorothioate linkage
  modified_base 98: mod_base = OTHER; note = 2'-O-methyl modified nucleotide with phosphorothioate linkage
  modified_base 99: mod_base = OTHER; note = 2'-O-methyl modified nucleotide with phosphorothioate linkage
  modified_base 100: mod_base = OTHER; note = 2'-O-methyl modified nucleotide

SEQ ID NO: 95 - RNA, 100 nt, synthetic construct; identical to SEQ ID NO: 63
  source 1..100: mol_type = other RNA; note = Description of Artificial Sequence: Synthetic polynucleotide
  modified_base 1: mod_base = OTHER; note = 2'-O-methyl modified nucleotide with phosphorothioate linkage
  modified_base 2: mod_base = OTHER; note = 2'-O-methyl modified nucleotide with phosphorothioate linkage
  modified_base 3: mod_base = OTHER; note = 2'-O-methyl modified nucleotide with phosphorothioate linkage
  modified_base 29: mod_base = OTHER; note = 2'-O-methyl modified nucleotide
  modified_base 30: mod_base = OTHER; note = 2'-O-methyl modified nucleotide
  modified_base 31: mod_base = OTHER; note = 2'-O-methyl modified nucleotide
  modified_base 32: mod_base = OTHER; note = 2'-O-methyl modified nucleotide
  modified_base 33: mod_base = OTHER; note = 2'-O-methyl modified nucleotide
  modified_base 34: mod_base = OTHER; note = 2'-O-methyl modified nucleotide
  modified_base 35: mod_base = OTHER; note = 2'-O-methyl modified nucleotide
  modified_base 36: mod_base = OTHER; note = 2'-O-methyl modified nucleotide
  modified_base 37: mod_base = OTHER; note = 2'-O-methyl modified nucleotide
  modified_base 38: mod_base = OTHER; note = 2'-O-methyl modified nucleotide
  modified_base 39: mod_base = OTHER; note = 2'-O-methyl modified nucleotide
  modified_base 40: mod_base = OTHER; note = 2'-O-methyl modified nucleotide
  modified_base 69: mod_base = OTHER; note = 2'-O-methyl modified nucleotide
  modified_base 70: mod_base = OTHER; note = 2'-O-methyl modified nucleotide
  modified_base 71: mod_base = OTHER; note = 2'-O-methyl modified nucleotide
  modified_base 72: mod_base = OTHER; note = 2'-O-methyl modified nucleotide
  modified_base 73: mod_base = OTHER; note = 2'-O-methyl modified nucleotide
  modified_base 74: mod_base = OTHER; note = 2'-O-methyl modified nucleotide
  modified_base 75: mod_base = OTHER; note = 2'-O-methyl modified nucleotide
  modified_base 76: mod_base = OTHER; note = 2'-O-methyl modified nucleotide
  modified_base 77: mod_base = OTHER; note = 2'-O-methyl modified nucleotide
  modified_base 78: mod_base = OTHER; note = 2'-O-methyl modified nucleotide
  modified_base 79: mod_base = OTHER; note = 2'-O-methyl modified nucleotide
  modified_base 80: mod_base = OTHER; note = 2'-O-methyl modified nucleotide
  modified_base 81: mod_base = OTHER; note = 2'-O-methyl modified nucleotide
  modified_base 82: mod_base = OTHER; note = 2'-O-methyl modified nucleotide
  modified_base 83: mod_base = OTHER; note = 2'-O-methyl modified nucleotide
  modified_base 84: mod_base = OTHER; note = 2'-O-methyl modified nucleotide
  modified_base 85: mod_base = OTHER; note = 2'-O-methyl modified nucleotide
  modified_base 86: mod_base = OTHER; note = 2'-O-methyl modified nucleotide
  modified_base 87: mod_base = OTHER; note = 2'-O-methyl modified nucleotide
  modified_base 88: mod_base = OTHER; note = 2'-O-methyl modified nucleotide
  modified_base 89: mod_base = OTHER; note = 2'-O-methyl modified nucleotide
  modified_base 90: mod_base = OTHER; note = 2'-O-methyl modified nucleotide
  modified_base 91: mod_base = OTHER; note = 2'-O-methyl modified nucleotide
  modified_base 92: mod_base = OTHER; note = 2'-O-methyl modified nucleotide
  modified_base 93: mod_base = OTHER; note = 2'-O-methyl modified nucleotide
  modified_base 94: mod_base = OTHER; note = 2'-O-methyl modified nucleotide
  modified_base 95: mod_base = OTHER; note = 2'-O-methyl modified nucleotide
  modified_base 96: mod_base = OTHER; note = 2'-O-methyl modified nucleotide
  modified_base 97: mod_base = OTHER; note = 2'-O-methyl modified nucleotide with phosphorothioate linkage
  modified_base 98: mod_base = OTHER; note = 2'-O-methyl modified nucleotide with phosphorothioate linkage
  modified_base 99: mod_base = OTHER; note = 2'-O-methyl modified nucleotide with phosphorothioate linkage
  modified_base 100: mod_base = OTHER; note = 2'-O-methyl modified nucleotide

SEQ ID NO: 96 - RNA, 100 nt, synthetic construct; identical to SEQ ID NO: 64
  source 1..100: mol_type = other RNA; note = Description of Artificial Sequence: Synthetic polynucleotide
  modified_base 1: mod_base = OTHER; note = 2'-O-methyl modified nucleotide with phosphorothioate linkage
  modified_base 2: mod_base = OTHER; note = 2'-O-methyl modified nucleotide with phosphorothioate linkage
  modified_base 3: mod_base = OTHER; note = 2'-O-methyl modified nucleotide with phosphorothioate linkage
  modified_base 29: mod_base = OTHER; note = 2'-O-methyl modified nucleotide
  modified_base 30: mod_base = OTHER; note = 2'-O-methyl modified nucleotide
  modified_base 31: mod_base = OTHER; note = 2'-O-methyl modified nucleotide
  modified_base 32: mod_base = OTHER; note = 2'-O-methyl modified nucleotide
  modified_base 33: mod_base = OTHER; note = 2'-O-methyl modified nucleotide
  modified_base 34: mod_base = OTHER; note = 2'-O-methyl modified nucleotide
  modified_base 35: mod_base = OTHER; note = 2'-O-methyl modified nucleotide
  modified_base 36: mod_base = OTHER; note = 2'-O-methyl modified nucleotide
  modified_base 37: mod_base = OTHER; note = 2'-O-methyl modified nucleotide
  modified_base 38: mod_base = OTHER; note = 2'-O-methyl modified nucleotide
  modified_base 39: mod_base = OTHER; note = 2'-O-methyl modified nucleotide
  modified_base 40: mod_base = OTHER; note = 2'-O-methyl modified nucleotide
  modified_base 69: mod_base = OTHER; note = 2'-O-methyl modified nucleotide
  modified_base 70: mod_base = OTHER; note = 2'-O-methyl modified nucleotide
  modified_base 71: mod_base = OTHER; note = 2'-O-methyl modified nucleotide
  modified_base 72: mod_base = OTHER; note = 2'-O-methyl modified nucleotide
  modified_base 73: mod_base = OTHER; note = 2'-O-methyl modified nucleotide
  modified_base 74: mod_base = OTHER; note = 2'-O-methyl modified nucleotide
  modified_base 75: mod_base = OTHER; note = 2'-O-methyl modified nucleotide
  modified_base 76: mod_base = OTHER; note = 2'-O-methyl modified nucleotide
  modified_base 77: mod_base = OTHER; note = 2'-O-methyl modified nucleotide
  modified_base 78: mod_base = OTHER; note = 2'-O-methyl modified nucleotide
  modified_base 79: mod_base = OTHER; note = 2'-O-methyl modified nucleotide
  modified_base 80: mod_base = OTHER; note = 2'-O-methyl modified nucleotide
  modified_base 81: mod_base = OTHER; note = 2'-O-methyl modified nucleotide
  modified_base 82: mod_base = OTHER; note = 2'-O-methyl modified nucleotide
  modified_base 83: mod_base = OTHER; note = 2'-O-methyl modified nucleotide
  modified_base 84: mod_base = OTHER; note = 2'-O-methyl modified nucleotide
  modified_base 85: mod_base = OTHER; note = 2'-O-methyl modified nucleotide
  modified_base 86: mod_base = OTHER; note = 2'-O-methyl modified nucleotide
  modified_base 87: mod_base = OTHER; note = 2'-O-methyl modified nucleotide
  modified_base 88: mod_base = OTHER; note = 2'-O-methyl modified nucleotide
  modified_base 89: mod_base = OTHER; note = 2'-O-methyl modified nucleotide
  modified_base 90: mod_base = OTHER; note = 2'-O-methyl modified nucleotide
  modified_base 91: mod_base = OTHER; note = 2'-O-methyl modified nucleotide
  modified_base 92: mod_base = OTHER; note = 2'-O-methyl modified nucleotide
  modified_base 93: mod_base = OTHER; note = 2'-O-methyl modified nucleotide
  modified_base 94: mod_base = OTHER; note = 2'-O-methyl modified nucleotide
  modified_base 95: mod_base = OTHER; note = 2'-O-methyl modified nucleotide
  modified_base 96: mod_base = OTHER; note = 2'-O-methyl modified nucleotide
  modified_base 97: mod_base = OTHER; note = 2'-O-methyl modified nucleotide with phosphorothioate linkage
  modified_base 98: mod_base = OTHER; note = 2'-O-methyl modified nucleotide with phosphorothioate linkage
  modified_base 99: mod_base = OTHER; note = 2'-O-methyl modified nucleotide with phosphorothioate linkage
  modified_base 100: mod_base = OTHER; note = 2'-O-methyl modified nucleotide

SEQ ID NO: 97 - RNA, 100 nt, synthetic construct; identical to SEQ ID NO: 65
  source 1..100: mol_type = other RNA; note = Description of Artificial Sequence: Synthetic polynucleotide
  modified_base 1: mod_base = OTHER; note = 2'-O-methyl modified nucleotide with phosphorothioate linkage
  modified_base 2: mod_base = OTHER; note = 2'-O-methyl modified nucleotide with phosphorothioate linkage
  modified_base 3: mod_base = OTHER; note = 2'-O-methyl modified nucleotide with phosphorothioate linkage
  modified_base 29: mod_base = OTHER; note = 2'-O-methyl modified nucleotide
  modified_base 30: mod_base = OTHER; note = 2'-O-methyl modified nucleotide
  modified_base 31: mod_base = OTHER; note = 2'-O-methyl modified nucleotide
  modified_base 32: mod_base = OTHER; note = 2'-O-methyl modified nucleotide
  modified_base 33: mod_base = OTHER; note = 2'-O-methyl modified nucleotide
  modified_base 34: mod_base = OTHER; note = 2'-O-methyl modified nucleotide
  modified_base 35: mod_base = OTHER; note = 2'-O-methyl modified nucleotide
  modified_base 36: mod_base = OTHER; note = 2'-O-methyl modified nucleotide
  modified_base 37: mod_base = OTHER; note = 2'-O-methyl modified nucleotide
  modified_base 38: mod_base = OTHER; note = 2'-O-methyl modified nucleotide
  modified_base 39: mod_base = OTHER; note = 2'-O-methyl modified nucleotide
  modified_base 40: mod_base = OTHER; note = 2'-O-methyl modified nucleotide
  modified_base 69: mod_base = OTHER; note = 2'-O-methyl modified nucleotide
  modified_base 70: mod_base = OTHER; note = 2'-O-methyl modified nucleotide
  modified_base 71: mod_base = OTHER; note = 2'-O-methyl modified nucleotide
  modified_base 72: mod_base = OTHER; note = 2'-O-methyl modified nucleotide
  modified_base 73: mod_base = OTHER; note = 2'-O-methyl modified nucleotide
  modified_base 74: mod_base = OTHER; note = 2'-O-methyl modified nucleotide
  modified_base 75: mod_base = OTHER; note = 2'-O-methyl modified nucleotide
  modified_base 76: mod_base = OTHER; note = 2'-O-methyl modified nucleotide
  modified_base 77: mod_base = OTHER; note = 2'-O-methyl modified nucleotide
  modified_base 78: mod_base = OTHER; note = 2'-O-methyl modified nucleotide
  modified_base 79: mod_base = OTHER; note = 2'-O-methyl modified nucleotide
  modified_base 80: mod_base = OTHER; note = 2'-O-methyl modified nucleotide
  modified_base 81: mod_base = OTHER; note = 2'-O-methyl modified nucleotide
  modified_base 82: mod_base = OTHER; note = 2'-O-methyl modified nucleotide
  modified_base 83: mod_base = OTHER; note = 2'-O-methyl modified nucleotide
  modified_base 84: mod_base = OTHER; note = 2'-O-methyl modified nucleotide
  modified_base 85: mod_base = OTHER; note = 2'-O-methyl modified nucleotide
  modified_base 86: mod_base = OTHER; note = 2'-O-methyl modified nucleotide
  modified_base 87: mod_base = OTHER; note = 2'-O-methyl modified nucleotide
  modified_base 88: mod_base = OTHER; note = 2'-O-methyl modified nucleotide
  modified_base 89: mod_base = OTHER; note = 2'-O-methyl modified nucleotide
  modified_base 90: mod_base = OTHER; note = 2'-O-methyl modified nucleotide
  modified_base 91: mod_base = OTHER; note = 2'-O-methyl modified nucleotide
  modified_base 92: mod_base = OTHER; note = 2'-O-methyl modified nucleotide
  modified_base 93: mod_base = OTHER; note = 2'-O-methyl modified nucleotide
  modified_base 94: mod_base = OTHER; note = 2'-O-methyl modified nucleotide
  modified_base 95: mod_base = OTHER; note = 2'-O-methyl modified nucleotide
  modified_base 96: mod_base = OTHER; note = 2'-O-methyl modified nucleotide
  modified_base 97: mod_base = OTHER; note = 2'-O-methyl modified nucleotide with phosphorothioate linkage
  modified_base 98: mod_base = OTHER; note = 2'-O-methyl modified nucleotide with phosphorothioate linkage
  modified_base 99: mod_base = OTHER; note = 2'-O-methyl modified nucleotide with phosphorothioate linkage
  modified_base 100: mod_base = OTHER; note = 2'-O-methyl modified nucleotide

SEQ ID NO: 98 - RNA, 20 nt, synthetic construct
  source 1..20: mol_type = other RNA; note = Description of Artificial Sequence: Synthetic oligonucleotide
atttgcatctgagaaccctt

SEQ ID NO: 99 - RNA, 20 nt, synthetic construct
  source 1..20: mol_type = other RNA; note = Description of Artificial Sequence: Synthetic oligonucleotide
atcgggaactggcatcttca

SEQ ID NO: 100 - RNA, 20 nt, synthetic construct
  source 1..20: mol_type = other RNA; note = Description of Artificial Sequence: Synthetic oligonucleotide
gttacaggaaaatctgaagg

SEQ ID NO: 101 - RNA, 20 nt, synthetic construct
  source 1..20: mol_type = other RNA; note = Description of Artificial Sequence: Synthetic oligonucleotide
gatcgggaactggcatcttc

SEQ ID NO: 102 - RNA, 20 nt, synthetic construct
  source 1..20: mol_type = other RNA; note = Description of Artificial Sequence: Synthetic oligonucleotide
tgcatctgagaacccttagg

SEQ ID NO: 103 - RNA, 20 nt, synthetic construct
  source 1..20: mol_type = other RNA; note = Description of Artificial Sequence: Synthetic oligonucleotide
cactcttgtctgtggaaaca

SEQ ID NO: 104 - RNA, 20 nt, synthetic construct
  source 1..20: mol_type = other RNA; note = Description of Artificial Sequence: Synthetic oligonucleotide
atcgttacaggaaaatctga

SEQ ID NO: 105 - RNA, 20 nt, synthetic construct
  source 1..20: mol_type = other RNA; note = Description of Artificial Sequence: Synthetic oligonucleotide
gcatcttcagggagtagctt

SEQ ID NO: 106 - RNA, 20 nt, synthetic construct
  source 1..20: mol_type = other RNA; note = Description of Artificial Sequence: Synthetic oligonucleotide
caatctttaaatatgttgtg

SEQ ID NO: 107 - RNA, 20 nt, synthetic construct
  source 1..20: mol_type = other RNA; note = Description of Artificial Sequence: Synthetic oligonucleotide
tcactcttgtctgtggaaac

SEQ ID NO: 108 - RNA, 20 nt, synthetic construct
  source 1..20: mol_type = other RNA; note = Description of Artificial Sequence: Synthetic oligonucleotide
tgcttgtatttttctagtaa

SEQ ID NO: 109 - RNA, 20 nt, synthetic construct
  source 1..20: mol_type = other RNA; note = Description of Artificial Sequence: Synthetic oligonucleotide
gtaaatatctactaagacaa

SEQ ID NO: 110 - RNA, 20 nt, synthetic construct
  source 1..20: mol_type = other RNA; note = Description of Artificial Sequence: Synthetic oligonucleotide
tttttctagtaatggaagcc

SEQ ID NO: 111 - RNA, 20 nt, synthetic construct
  source 1..20: mol_type = other RNA; note = Description of Artificial Sequence: Synthetic oligonucleotide
ttatattattgatatatttt

SEQ ID NO: 112 - RNA, 20 nt, synthetic construct
  source 1..20: mol_type = other RNA; note = Description of Artificial Sequence: Synthetic oligonucleotide
gcacagatataaacacttaa

SEQ ID NO: 113 - RNA, 20 nt, synthetic construct
  source 1..20: mol_type = other RNA; note = Description of Artificial Sequence: Synthetic oligonucleotide
cacagatataaacacttaac

SEQ ID NO: 114 - RNA, 20 nt, synthetic construct
  source 1..20: mol_type = other RNA; note = Description of Artificial Sequence: Synthetic oligonucleotide
ggttttaaaaataataatgt

SEQ ID NO: 115 - RNA, 20 nt, synthetic construct
  source 1..20: mol_type = other RNA; note = Description of Artificial Sequence: Synthetic oligonucleotide
tcagattttcctgtaacgat

SEQ ID NO: 116 - RNA, 20 nt, synthetic construct
  source 1..20: mol_type = other RNA; note = Description of Artificial Sequence: Synthetic oligonucleotide
cagattttcctgtaacgatc

SEQ ID NO: 117 - RNA, 20 nt, synthetic construct
  source 1..20: mol_type = other RNA; note = Description of Artificial Sequence: Synthetic oligonucleotide
caatggtaaataagaaataa

SEQ ID NO: 118 - RNA, 20 nt, synthetic construct
  source 1..20: mol_type = other RNA; note = Description of Artificial Sequence: Synthetic oligonucleotide
ggaaaatctgaaggtggcaa

SEQ ID NO: 119 - RNA, 20 nt, synthetic construct
  source 1..20: mol_type = other RNA; note = Description of Artificial Sequence: Synthetic oligonucleotide
ggcgatctcactcttgtctg

SEQ ID NO: 120 - RNA, 100 nt, synthetic construct
  source 1..100: mol_type = other RNA; note = Description of Artificial Sequence: Synthetic polynucleotide
atttgcatctgagaacccttgttttagagctagaaatagcaagttaaaataaggctagtccgttatcaacttgaaaaagtggcaccgagtcggtgctttt

SEQ ID NO: 121 - RNA, 100 nt, synthetic construct
  source 1..100: mol_type = other RNA; note = Description of Artificial Sequence: Synthetic polynucleotide
atcgggaactggcatcttcagttttagagctagaaatagcaagttaaaataaggctagtccgttatcaacttgaaaaagtggcaccgagtcggtgctttt

SEQ ID NO: 122 - RNA, 100 nt, synthetic construct
  source 1..100: mol_type = other RNA; note = Description of Artificial Sequence: Synthetic polynucleotide
gttacaggaaaatctgaagggttttagagctagaaatagcaagttaaaataaggctagtccgttatcaacttgaaaaagtggcaccgagtcggtgctttt

SEQ ID NO: 123 - RNA, 100 nt, synthetic construct
  source 1..100: mol_type = other RNA; note = Description of Artificial Sequence: Synthetic polynucleotide
gatcgggaactggcatcttcgttttagagctagaaatagcaagttaaaataaggctagtccgttatcaacttgaaaaagtggcaccgagtcggtgctttt

SEQ ID NO: 124 - RNA, 100 nt, synthetic construct
  source 1..100: mol_type = other RNA; note = Description of Artificial Sequence: Synthetic polynucleotide
tgcatctgagaacccttagggttttagagctagaaatagcaagttaaaataaggctagtccgttatcaacttgaaaaagtggcaccgagtcggtgctttt

SEQ ID NO: 125 - RNA, 100 nt, synthetic construct
  source 1..100: mol_type = other RNA; note = Description of Artificial Sequence: Synthetic polynucleotide
cactcttgtctgtggaaacagttttagagctagaaatagcaagttaaaataaggctagtccgttatcaacttgaaaaagtggcaccgagtcggtgctttt

SEQ ID NO: 126 - RNA, 100 nt, synthetic construct
  source 1..100: mol_type = other RNA; note = Description of Artificial Sequence: Synthetic polynucleotide
atcgttacaggaaaatctgagttttagagctagaaatagcaagttaaaataaggctagtccgttatcaacttgaaaaagtggcaccgagtcggtgctttt

SEQ ID NO: 127 - RNA, 100 nt, synthetic construct
  source 1..100: mol_type = other RNA; note = Description of Artificial Sequence: Synthetic polynucleotide
gcatcttcagggagtagcttgttttagagctagaaatagcaagttaaaataaggctagtccgttatcaacttgaaaaagtggcaccgagtcggtgctttt

SEQ ID NO: 128 - RNA, 100 nt, synthetic construct
  source 1..100: mol_type = other RNA; note = Description of Artificial Sequence: Synthetic polynucleotide
caatctttaaatatgttgtggttttagagctagaaatagcaagttaaaataaggctagtccgttatcaacttgaaaaagtggcaccgagtcggtgctttt

SEQ ID NO: 129 - RNA, 100 nt, synthetic construct
  source 1..100: mol_type = other RNA; note = Description of Artificial Sequence: Synthetic polynucleotide
tcactcttgtctgtggaaacgttttagagctagaaatagcaagttaaaataaggctagtccgttatcaacttgaaaaagtggcaccgagtcggtgctttt

SEQ ID NO: 130 - RNA, 100 nt, synthetic construct
  source 1..100: mol_type = other RNA; note = Description of Artificial Sequence: Synthetic polynucleotide
tgcttgtatttttctagtaagttttagagctagaaatagcaagttaaaataaggctagtccgttatcaacttgaaaaagtggcaccgagtcggtgctttt

SEQ ID NO: 131 - RNA, 100 nt, synthetic construct
  source 1..100: mol_type = other RNA; note = Description of Artificial Sequence: Synthetic polynucleotide
gtaaatatctactaagacaagttttagagctagaaatagcaagttaaaataaggctagtccgttatcaacttgaaaaagtggcaccgagtcggtgctttt

SEQ ID NO: 132 - RNA, 100 nt, synthetic construct
  source 1..100: mol_type = other RNA; note = Description of Artificial Sequence: Synthetic polynucleotide
tttttctagtaatggaagccgttttagagctagaaatagcaagttaaaataaggctagtccgttatcaacttgaaaaagtggcaccgagtcggtgctttt

SEQ ID NO: 133 - RNA, 100 nt, synthetic construct
  source 1..100: mol_type = other RNA; note = Description of Artificial Sequence: Synthetic polynucleotide
ttatattattgatatattttgttttagagctagaaatagcaagttaaaataaggctagtccgttatcaacttgaaaaagtggcaccgagtcggtgctttt

SEQ ID NO: 134 - RNA, 100 nt, synthetic construct
  source 1..100: mol_type = other RNA; note = Description of Artificial Sequence: Synthetic polynucleotide
gcacagatataaacacttaagttttagagctagaaatagcaagttaaaataaggctagtccgttatcaacttgaaaaagtggcaccgagtcggtgctttt

SEQ ID NO: 135 - RNA, 100 nt, synthetic construct
  source 1..100: mol_type = other RNA; note = Description of Artificial Sequence: Synthetic polynucleotide
cacagatataaacacttaacgttttagagctagaaatagcaagttaaaataaggctagtccgttatcaacttgaaaaagtggcaccgagtcggtgctttt

SEQ ID NO: 136 - RNA, 100 nt, synthetic construct
  source 1..100: mol_type = other RNA; note = Description of Artificial Sequence: Synthetic polynucleotide
ggttttaaaaataataatgtgttttagagctagaaatagcaagttaaaataaggctagtccgttatcaacttgaaaaagtggcaccgagtcggtgctttt

SEQ ID NO: 137 - RNA, 100 nt, synthetic construct
  source 1..100: mol_type = other RNA; note = Description of Artificial Sequence: Synthetic polynucleotide
tcagattttcctgtaacgatgttttagagctagaaatagcaagttaaaataaggctagtccgttatcaacttgaaaaagtggcaccgagtcggtgctttt

SEQ ID NO: 138 - RNA, 100 nt, synthetic construct
  source 1..100: mol_type = other RNA; note = Description of Artificial Sequence: Synthetic polynucleotide
cagattttcctgtaacgatcgttttagagctagaaatagcaagttaaaataaggctagtccgttatcaacttgaaaaagtggcaccgagtcggtgctttt

SEQ ID NO: 139 - RNA, 100 nt, synthetic construct
  source 1..100: mol_type = other RNA; note = Description of Artificial Sequence: Synthetic polynucleotide
caatggtaaataagaaataagttttagagctagaaatagcaagttaaaataaggctagtccgttatcaacttgaaaaagtggcaccgagtcggtgctttt

SEQ ID NO: 140 - RNA, 100 nt, synthetic construct
  source 1..100: mol_type = other RNA; note = Description of Artificial Sequence: Synthetic polynucleotide
ggaaaatctgaaggtggcaagttttagagctagaaatagcaagttaaaataaggctagtccgttatcaacttgaaaaagtggcaccgagtcggtgctttt

SEQ ID NO: 141 - RNA, 100 nt, synthetic construct
  source 1..100: mol_type = other RNA; note = Description of Artificial Sequence: Synthetic polynucleotide
ggcgatctcactcttgtctggttttagagctagaaatagcaagttaaaataaggctagtccgttatcaacttgaaaaagtggcaccgagtcggtgctttt

SEQ ID NO: 142 - RNA, 100 nt, synthetic construct; identical to SEQ ID NO: 120
  source 1..100: mol_type = other RNA; note = Description of Artificial Sequence: Synthetic polynucleotide
  modified_base 1: mod_base = OTHER; note = 2'-O-methyl modified nucleotide with phosphorothioate linkage
  modified_base 2: mod_base = OTHER; note = 2'-O-methyl modified nucleotide with phosphorothioate linkage
  modified_base 3: mod_base = OTHER; note = 2'-O-methyl modified nucleotide with phosphorothioate linkage
  modified_base 29: mod_base = OTHER; note = 2'-O-methyl modified nucleotide
  modified_base 30: mod_base = OTHER; note = 2'-O-methyl modified nucleotide
  modified_base 31: mod_base = OTHER; note = 2'-O-methyl modified nucleotide
  modified_base 32: mod_base = OTHER; note = 2'-O-methyl modified nucleotide
  modified_base 33: mod_base = OTHER; note = 2'-O-methyl modified nucleotide
  modified_base 34: mod_base = OTHER; note = 2'-O-methyl modified nucleotide
  modified_base 35: mod_base = OTHER; note = 2'-O-methyl modified nucleotide
  modified_base 36: mod_base = OTHER; note = 2'-O-methyl modified nucleotide
  modified_base 37: mod_base = OTHER; note = 2'-O-methyl modified nucleotide
  modified_base 38: mod_base = OTHER; note = 2'-O-methyl modified nucleotide
  modified_base 39: mod_base = OTHER; note = 2'-O-methyl modified nucleotide
  modified_base 40: mod_base = OTHER; note = 2'-O-methyl modified nucleotide
  modified_base 69: mod_base = OTHER; note = 2'-O-methyl modified nucleotide
  modified_base 70: mod_base = OTHER; note = 2'-O-methyl modified nucleotide
  modified_base 71: mod_base = OTHER; note = 2'-O-methyl modified nucleotide
  modified_base 72: mod_base = OTHER; note = 2'-O-methyl modified nucleotide
  modified_base 73: mod_base = OTHER; note = 2'-O-methyl modified nucleotide
  modified_base 74: mod_base = OTHER; note = 2'-O-methyl modified nucleotide
  modified_base 75: mod_base = OTHER; note = 2'-O-methyl modified nucleotide
  modified_base 76: mod_base = OTHER; note = 2'-O-methyl modified nucleotide
  modified_base 77: mod_base = OTHER; note = 2'-O-methyl modified nucleotide
  modified_base 78: mod_base = OTHER; note = 2'-O-methyl modified nucleotide
  modified_base 79: mod_base = OTHER; note = 2'-O-methyl modified nucleotide
  modified_base 80: mod_base = OTHER; note = 2'-O-methyl modified nucleotide
  modified_base 81: mod_base = OTHER; note = 2'-O-methyl modified nucleotide
  modified_base 82: mod_base = OTHER; note = 2'-O-methyl modified nucleotide
  modified_base 83: mod_base = OTHER; note = 2'-O-methyl modified nucleotide
  modified_base 84: mod_base = OTHER; note = 2'-O-methyl modified nucleotide
  modified_base 85: mod_base = OTHER; note = 2'-O-methyl modified nucleotide
  modified_base 86: mod_base = OTHER; note = 2'-O-methyl modified nucleotide
  modified_base 87: mod_base = OTHER; note = 2'-O-methyl modified nucleotide
  modified_base 88: mod_base = OTHER; note = 2'-O-methyl modified nucleotide
  modified_base 89: mod_base = OTHER; note = 2'-O-methyl modified nucleotide
  modified_base 90: mod_base = OTHER; note = 2'-O-methyl modified nucleotide
  modified_base 91: mod_base = OTHER; note = 2'-O-methyl modified nucleotide
  modified_base 92: mod_base = OTHER; note = 2'-O-methyl modified nucleotide
  modified_base 93: mod_base = OTHER; note = 2'-O-methyl modified nucleotide
  modified_base 94: mod_base = OTHER; note = 2'-O-methyl modified nucleotide
  modified_base 95: mod_base = OTHER; note = 2'-O-methyl modified nucleotide
  modified_base 96: mod_base = OTHER; note = 2'-O-methyl modified nucleotide
  modified_base 97: mod_base = OTHER; note = 2'-O-methyl modified nucleotide with phosphorothioate linkage
  modified_base 98: mod_base = OTHER; note = 2'-O-methyl modified nucleotide with phosphorothioate linkage
  modified_base 99: mod_base = OTHER; note = 2'-O-methyl modified nucleotide with phosphorothioate linkage
  modified_base 100: mod_base = OTHER; note = 2'-O-methyl modified nucleotide

SEQ ID NO: 143 - RNA, 100 nt, synthetic construct; identical to SEQ ID NO: 121
  source 1..100: mol_type = other RNA; note = Description of Artificial Sequence: Synthetic polynucleotide
  modified_base 1: mod_base = OTHER; note = 2'-O-methyl modified nucleotide with phosphorothioate linkage
  modified_base 2: mod_base = OTHER; note = 2'-O-methyl modified nucleotide with phosphorothioate linkage
  modified_base 3: mod_base = OTHER; note = 2'-O-methyl modified nucleotide with phosphorothioate linkage
  modified_base 29: mod_base = OTHER; note = 2'-O-methyl modified nucleotide
  modified_base 30: mod_base = OTHER; note = 2'-O-methyl modified nucleotide
  modified_base 31: mod_base = OTHER; note = 2'-O-methyl modified nucleotide
  modified_base 32: mod_base = OTHER; note = 2'-O-methyl modified nucleotide
  modified_base 33: mod_base = OTHER; note = 2'-O-methyl modified nucleotide
  modified_base 34: mod_base = OTHER; note = 2'-O-methyl modified nucleotide
  modified_base 35: mod_base = OTHER; note = 2'-O-methyl modified nucleotide
  modified_base 36: mod_base = OTHER; note = 2'-O-methyl modified nucleotide
  modified_base 37: mod_base = OTHER; note = 2'-O-methyl modified nucleotide
  modified_base 38: mod_base = OTHER; note = 2'-O-methyl modified nucleotide
  modified_base 39: mod_base = OTHER; note = 2'-O-methyl modified nucleotide
  modified_base 40: mod_base = OTHER; note = 2'-O-methyl modified nucleotide
  modified_base 69: mod_base = OTHER; note = 2'-O-methyl modified nucleotide
  modified_base 70: mod_base = OTHER; note = 2'-O-methyl modified nucleotide
  modified_base 71: mod_base = OTHER; note = 2'-O-methyl modified nucleotide
  modified_base 72: mod_base = OTHER; note = 2'-O-methyl modified nucleotide
  modified_base 73: mod_base = OTHER; note = 2'-O-methyl modified nucleotide
  modified_base 74: mod_base = OTHER; note = 2'-O-methyl modified nucleotide
  modified_base 75: mod_base = OTHER; note = 2'-O-methyl modified nucleotide
  modified_base 76: mod_base = OTHER; note = 2'-O-methyl modified nucleotide
  modified_base 77: mod_base = OTHER; note = 2'-O-methyl modified nucleotide
  modified_base 78: mod_base = OTHER; note = 2'-O-methyl modified nucleotide
  modified_base 79: mod_base = OTHER; note = 2'-O-methyl modified nucleotide
  modified_base 80: mod_base = OTHER; note = 2'-O-methyl modified nucleotide
  modified_base 81: mod_base = OTHER; note = 2'-O-methyl modified nucleotide
  modified_base 82: mod_base = OTHER; note = 2'-O-methyl modified nucleotide
  modified_base 83: mod_base = OTHER; note = 2'-O-methyl modified nucleotide
  modified_base 84: mod_base = OTHER; note = 2'-O-methyl modified nucleotide
  modified_base 85: mod_base = OTHER; note = 2'-O-methyl modified nucleotide
  modified_base 86: mod_base = OTHER; note = 2'-O-methyl modified nucleotide
  modified_base 87: mod_base = OTHER; note = 2'-O-methyl modified nucleotide
  modified_base 88: mod_base = OTHER; note = 2'-O-methyl modified nucleotide
  modified_base 89: mod_base = OTHER; note = 2'-O-methyl modified nucleotide
  modified_base 90: mod_base = OTHER; note = 2'-O-methyl modified nucleotide
  modified_base 91: mod_base = OTHER; note = 2'-O-methyl modified nucleotide
  modified_base 92: mod_base = OTHER; note = 2'-O-methyl modified nucleotide
  modified_base 93: mod_base = OTHER; note = 2'-O-methyl modified nucleotide
  modified_base 94: mod_base = OTHER; note = 2'-O-methyl modified nucleotide
  modified_base 95: mod_base = OTHER; note = 2'-O-methyl modified nucleotide
  modified_base 96: mod_base = OTHER; note = 2'-O-methyl modified nucleotide
  modified_base 97: mod_base = OTHER; note = 2'-O-methyl modified nucleotide with phosphorothioate linkage
  modified_base 98: mod_base = OTHER; note = 2'-O-methyl modified nucleotide with phosphorothioate linkage
  modified_base 99: mod_base = OTHER; note = 2'-O-methyl modified nucleotide with phosphorothioate linkage
  modified_base 100: mod_base = OTHER; note = 2'-O-methyl modified nucleotide

SEQ ID NO: 144 - RNA, 100 nt, synthetic construct; identical to SEQ ID NO: 122
  source 1..100: mol_type = other RNA; note = Description of Artificial Sequence: Synthetic polynucleotide
  modified_base 1: mod_base = OTHER; note = 2'-O-methyl modified nucleotide with phosphorothioate linkage
  modified_base 2: mod_base = OTHER; note = 2'-O-methyl modified nucleotide with phosphorothioate linkage
  modified_base 3: mod_base = OTHER; note = 2'-O-methyl modified nucleotide with phosphorothioate linkage
  modified_base 29: mod_base = OTHER; note = 2'-O-methyl modified nucleotide
  modified_base 30: mod_base = OTHER; note = 2'-O-methyl modified nucleotide
  modified_base 31: mod_base = OTHER; note = 2'-O-methyl modified nucleotide
  modified_base 32: mod_base = OTHER; note = 2'-O-methyl modified nucleotide
  modified_base 33: mod_base = OTHER; note = 2'-O-methyl modified nucleotide
  modified_base 34: mod_base = OTHER; note = 2'-O-methyl modified nucleotide
  modified_base 35: mod_base = OTHER; note = 2'-O-methyl modified nucleotide
  modified_base 36: mod_base = OTHER; note = 2'-O-methyl modified nucleotide
  modified_base 37: mod_base = OTHER; note = 2'-O-methyl modified nucleotide
  modified_base 38: mod_base = OTHER; note = 2'-O-methyl modified nucleotide
  modified_base 39: mod_base = OTHER; note = 2'-O-methyl modified nucleotide
  modified_base 40: mod_base = OTHER; note = 2'-O-methyl modified nucleotide
  modified_base 69: mod_base = OTHER; note = 2'-O-methyl modified nucleotide
  modified_base 70: mod_base = OTHER; note = 2'-O-methyl modified nucleotide
  modified_base 71: mod_base = OTHER; note = 2'-O-methyl modified nucleotide
  modified_base 72: mod_base = OTHER; note = 2'-O-methyl modified nucleotide
  modified_base 73: mod_base = OTHER; note = 2'-O-methyl modified nucleotide
  modified_base 74: mod_base = OTHER; note = 2'-O-methyl modified nucleotide
  modified_base 75: mod_base = OTHER; note = 2'-O-methyl modified nucleotide
  modified_base 76: mod_base = OTHER; note = 2'-O-methyl modified nucleotide
  modified_base 77: mod_base = OTHER; note = 2'-O-methyl modified nucleotide
  modified_base 78: mod_base = OTHER; note = 2'-O-methyl modified nucleotide
  modified_base 79: mod_base = OTHER; note = 2'-O-methyl modified nucleotide
  modified_base 80: mod_base = OTHER; note = 2'-O-methyl modified nucleotide
  modified_base 81: mod_base = OTHER; note = 2'-O-methyl modified nucleotide
  modified_base 82: mod_base = OTHER; note = 2'-O-methyl modified nucleotide
  modified_base 83: mod_base = OTHER; note = 2'-O-methyl modified nucleotide
  modified_base 84: mod_base = OTHER; note = 2'-O-methyl modified nucleotide
  modified_base 85: mod_base = OTHER; note = 2'-O-methyl modified nucleotide
  modified_base 86: mod_base = OTHER; note = 2'-O-methyl modified nucleotide
  modified_base 87: mod_base = OTHER; note = 2'-O-methyl modified nucleotide
  modified_base 88: mod_base = OTHER; note = 2'-O-methyl modified nucleotide
  modified_base 89: mod_base = OTHER; note = 2'-O-methyl modified nucleotide
  modified_base 90: mod_base = OTHER; note = 2'-O-methyl modified nucleotide
  modified_base 91: mod_base = OTHER; note = 2'-O-methyl modified nucleotide
  modified_base 92: mod_base = OTHER; note = 2'-O-methyl modified nucleotide
  modified_base 93: mod_base = OTHER; note = 2'-O-methyl modified nucleotide
  modified_base 94: mod_base = OTHER; note = 2'-O-methyl modified nucleotide
  modified_base 95: mod_base = OTHER; note = 2'-O-methyl modified nucleotide
  modified_base 96: mod_base = OTHER; note = 2'-O-methyl modified nucleotide
  modified_base 97: mod_base = OTHER; note = 2'-O-methyl modified nucleotide with phosphorothioate linkage
  modified_base 98: mod_base = OTHER; note = 2'-O-methyl modified nucleotide with phosphorothioate linkage
  modified_base 99: mod_base = OTHER; note = 2'-O-methyl modified nucleotide with phosphorothioate linkage
  modified_base 100: mod_base = OTHER; note = 2'-O-methyl modified nucleotide

SEQ ID NO: 145 - RNA, 100 nt, synthetic construct; identical to SEQ ID NO: 123
  source 1..100: mol_type = other RNA; note = Description of Artificial Sequence: Synthetic polynucleotide
  modified_base 1: mod_base = OTHER; note = 2'-O-methyl modified nucleotide with phosphorothioate linkage
  modified_base 2: mod_base = OTHER; note = 2'-O-methyl modified nucleotide with phosphorothioate linkage
  modified_base 3: mod_base = OTHER; note = 2'-O-methyl modified nucleotide with phosphorothioate linkage
  modified_base 29: mod_base = OTHER; note = 2'-O-methyl modified nucleotide
  modified_base 30: mod_base = OTHER; note = 2'-O-methyl modified nucleotide
  modified_base 31: mod_base = OTHER; note = 2'-O-methyl modified nucleotide
  modified_base 32: mod_base = OTHER; note = 2'-O-methyl modified nucleotide
  modified_base 33: mod_base = OTHER; note = 2'-O-methyl modified nucleotide
  modified_base 34: mod_base = OTHER; note = 2'-O-methyl modified nucleotide
  modified_base 35: mod_base = OTHER; note = 2'-O-methyl modified nucleotide
  modified_base 36: mod_base = OTHER; note = 2'-O-methyl modified nucleotide
  modified_base 37: mod_base = OTHER; note = 2'-O-methyl modified nucleotide
  modified_base 38: mod_base = OTHER; note = 2'-O-methyl modified nucleotide
  modified_base 39: mod_base = OTHER; note = 2'-O-methyl modified nucleotide
  modified_base 40: mod_base = OTHER; note = 2'-O-methyl modified nucleotide
  modified_base 69: mod_base = OTHER; note = 2'-O-methyl modified nucleotide
  modified_base 70: mod_base = OTHER; note = 2'-O-methyl modified nucleotide
  modified_base 71: mod_base = OTHER; note = 2'-O-methyl modified nucleotide
  modified_base 72: mod_base = OTHER; note = 2'-O-methyl modified nucleotide
  modified_base 73: mod_base = OTHER; note = 2'-O-methyl modified nucleotide
  modified_base 74: mod_base = OTHER; note = 2'-O-methyl modified nucleotide
  modified_base 75: mod_base = OTHER; note = 2'-O-methyl modified nucleotide
  modified_base 76: mod_base = OTHER; note = 2'-O-methyl modified nucleotide
  modified_base 77: mod_base = OTHER; note = 2'-O-methyl modified nucleotide
  modified_base 78: mod_base = OTHER; note = 2'-O-methyl modified nucleotide
  modified_base 79: mod_base = OTHER; note = 2'-O-methyl modified nucleotide
  modified_base 80: mod_base = OTHER; note = 2'-O-methyl modified nucleotide
  modified_base 81: mod_base = OTHER; note = 2'-O-methyl modified nucleotide
  modified_base 82: mod_base = OTHER; note = 2'-O-methyl modified nucleotide
  modified_base 83: mod_base = OTHER; note = 2'-O-methyl modified nucleotide
  modified_base 84: mod_base = OTHER; note = 2'-O-methyl modified nucleotide
  modified_base 85: mod_base = OTHER; note = 2'-O-methyl modified nucleotide
  modified_base 86: mod_base = OTHER; note = 2'-O-methyl modified nucleotide
  modified_base 87: mod_base = OTHER; note = 2'-O-methyl modified nucleotide
  modified_base 88: mod_base = OTHER; note = 2'-O-methyl modified nucleotide
  modified_base 89: mod_base = OTHER; note = 2'-O-methyl modified nucleotide
  modified_base 90: mod_base = OTHER; note = 2'-O-methyl modified nucleotide
  modified_base 91: mod_base = OTHER; note = 2'-O-methyl modified nucleotide
  modified_base 92: mod_base = OTHER; note = 2'-O-methyl modified nucleotide
  modified_base 93: mod_base = OTHER; note = 2'-O-methyl modified nucleotide
  modified_base 94: mod_base = OTHER; note = 2'-O-methyl modified nucleotide
  modified_base 95: mod_base = OTHER; note = 2'-O-methyl modified nucleotide
  modified_base 96: mod_base = OTHER; note = 2'-O-methyl modified nucleotide
  modified_base 97: mod_base = OTHER; note = 2'-O-methyl modified nucleotide with phosphorothioate linkage
  modified_base 98: mod_base = OTHER; note = 2'-O-methyl modified nucleotide with phosphorothioate linkage
  modified_base 99: mod_base = OTHER; note = 2'-O-methyl modified nucleotide with phosphorothioate linkage
  modified_base 100: mod_base = OTHER; note = 2'-O-methyl modified nucleotide

SEQ ID NO: 146 - RNA, 100 nt, synthetic construct; identical to SEQ ID NO: 124
  source 1..100: mol_type = other RNA; note = Description of Artificial Sequence: Synthetic polynucleotide
  modified_base 1: mod_base = OTHER; note = 2'-O-methyl modified nucleotide with phosphorothioate linkage
  modified_base 2: mod_base = OTHER; note = 2'-O-methyl modified nucleotide with phosphorothioate linkage
  modified_base 3: mod_base = OTHER; note = 2'-O-methyl modified nucleotide with phosphorothioate linkage
  modified_base 29: mod_base = OTHER; note = 2'-O-methyl modified nucleotide
  modified_base 30: mod_base = OTHER; note = 2'-O-methyl modified nucleotide
  modified_base 31: mod_base = OTHER; note = 2'-O-methyl modified nucleotide
  modified_base 32: mod_base = OTHER; note = 2'-O-methyl modified nucleotide
  modified_base 33: mod_base = OTHER; note = 2'-O-methyl modified nucleotide
  modified_base 34: mod_base = OTHER; note = 2'-O-methyl modified nucleotide
  modified_base 35: mod_base = OTHER; note = 2'-O-methyl modified nucleotide
  modified_base 36: mod_base = OTHER; note = 2'-O-methyl modified nucleotide
  modified_base 37: mod_base = OTHER; note = 2'-O-methyl modified nucleotide
  modified_base 38: mod_base = OTHER; note = 2'-O-methyl modified nucleotide
  modified_base 39: mod_base = OTHER; note = 2'-O-methyl modified nucleotide
  modified_base 40: mod_base = OTHER; note = 2'-O-methyl modified nucleotide
  modified_base 69: mod_base = OTHER; note = 2'-O-methyl modified nucleotide
  modified_base 70: mod_base = OTHER; note = 2'-O-methyl modified nucleotide
  modified_base 71: mod_base = OTHER; note = 2'-O-methyl modified nucleotide
  modified_base 72: mod_base = OTHER; note = 2'-O-methyl modified nucleotide
  modified_base 73: mod_base = OTHER; note = 2'-O-methyl modified nucleotide
  modified_base 74: mod_base = OTHER; note = 2'-O-methyl modified nucleotide
  modified_base 75: mod_base = OTHER; note = 2'-O-methyl modified nucleotide
  modified_base 76: mod_base = OTHER; note = 2'-O-methyl modified nucleotide
  modified_base 77: mod_base = OTHER; note = 2'-O-methyl modified nucleotide
  modified_base 78: mod_base = OTHER; note = 2'-O-methyl modified nucleotide
  modified_base 79: mod_base = OTHER; note = 2'-O-methyl modified nucleotide
  modified_base 80: mod_base = OTHER; note = 2'-O-methyl modified nucleotide
  modified_base 81: mod_base = OTHER; note = 2'-O-methyl modified nucleotide
  modified_base 82: mod_base = OTHER; note = 2'-O-methyl modified nucleotide
  modified_base 83: mod_base = OTHER; note = 2'-O-methyl modified nucleotide
  modified_base 84: mod_base = OTHER; note = 2'-O-methyl modified nucleotide
  modified_base 85: mod_base = OTHER; note = 2'-O-methyl modified nucleotide
  modified_base 86: mod_base = OTHER; note = 2'-O-methyl modified nucleotide
  modified_base 87: mod_base = OTHER; note = 2'-O-methyl modified nucleotide
  modified_base 88: mod_base = OTHER; note = 2'-O-methyl modified nucleotide
  modified_base 89: mod_base = OTHER; note = 2'-O-methyl modified nucleotide
  modified_base 90: mod_base = OTHER; note = 2'-O-methyl modified nucleotide
  modified_base 91: mod_base = OTHER; note = 2'-O-methyl modified nucleotide
  modified_base 92: mod_base = OTHER; note = 2'-O-methyl modified nucleotide
  modified_base 93: mod_base = OTHER; note = 2'-O-methyl modified nucleotide
  modified_base 94: mod_base = OTHER; note = 2'-O-methyl modified nucleotide
  modified_base 95: mod_base = OTHER; note = 2'-O-methyl modified nucleotide
  modified_base 96: mod_base = OTHER; note = 2'-O-methyl modified nucleotide
  modified_base 97: mod_base = OTHER; note = 2'-O-methyl modified nucleotide with phosphorothioate linkage
  modified_base 98: mod_base = OTHER; note = 2'-O-methyl modified nucleotide with phosphorothioate linkage
  modified_base 99: mod_base = OTHER; note = 2'-O-methyl modified nucleotide with phosphorothioate linkage
  modified_base 100: mod_base = OTHER; note = 2'-O-methyl modified nucleotide

SEQ ID NO: 147 - RNA, 100 nt, synthetic construct; identical to SEQ ID NO: 125
  source 1..100: mol_type = other RNA; note = Description of Artificial Sequence: Synthetic polynucleotide
  modified_base 1: mod_base = OTHER; note = 2'-O-methyl modified nucleotide with phosphorothioate linkage
  modified_base 2: mod_base = OTHER; note = 2'-O-methyl modified nucleotide with phosphorothioate linkage
  modified_base 3: mod_base = OTHER; note = 2'-O-methyl modified nucleotide with phosphorothioate linkage
  modified_base 29: mod_base = OTHER; note = 2'-O-methyl modified nucleotide
  modified_base 30: mod_base = OTHER; note = 2'-O-methyl modified nucleotide
  modified_base 31: mod_base = OTHER; note = 2'-O-methyl modified nucleotide
  modified_base 32: mod_base = OTHER; note = 2'-O-methyl modified nucleotide
  modified_base 33: mod_base = OTHER; note = 2'-O-methyl modified nucleotide
  modified_base 34: mod_base = OTHER; note = 2'-O-methyl modified nucleotide
  modified_base 35: mod_base = OTHER; note = 2'-O-methyl modified nucleotide
  modified_base 36: mod_base = OTHER; note = 2'-O-methyl modified nucleotide
  modified_base 37: mod_base = OTHER; note = 2'-O-methyl modified nucleotide
  modified_base 38: mod_base = OTHER; note = 2'-O-methyl modified nucleotide
  modified_base 39: mod_base = OTHER; note = 2'-O-methyl modified nucleotide
  modified_base 40: mod_base = OTHER; note = 2'-O-methyl modified nucleotide
  modified_base 69: mod_base = OTHER; note = 2'-O-methyl modified nucleotide
  modified_base 70: mod_base = OTHER; note = 2'-O-methyl modified nucleotide
  modified_base 71: mod_base = OTHER; note = 2'-O-methyl modified nucleotide
  modified_base 72: mod_base = OTHER; note = 2'-O-methyl modified nucleotide
  modified_base 73: mod_base = OTHER; note = 2'-O-methyl modified nucleotide
  modified_base 74: mod_base = OTHER; note = 2'-O-methyl modified nucleotide
  modified_base 75: mod_base = OTHER; note = 2'-O-methyl modified nucleotide
  modified_base 76: mod_base = OTHER; note = 2'-O-methyl modified nucleotide
  modified_base 77: mod_base = OTHER; note = 2'-O-methyl modified nucleotide
  modified_base 78: mod_base = OTHER; note = 2'-O-methyl modified nucleotide
  modified_base 79: mod_base = OTHER; note = 2'-O-methyl modified nucleotide
  modified_base 80: mod_base = OTHER; note = 2'-O-methyl modified nucleotide
  modified_base 81: mod_base = OTHER; note = 2'-O-methyl modified nucleotide
  modified_base 82: mod_base = OTHER; note = 2'-O-methyl modified nucleotide
  modified_base 83: mod_base = OTHER; note = 2'-O-methyl modified nucleotide
  modified_base 84: mod_base = OTHER; note = 2'-O-methyl modified nucleotide
  modified_base 85: mod_base = OTHER; note = 2'-O-methyl modified nucleotide
  modified_base 86: mod_base = OTHER; note = 2'-O-methyl modified nucleotide
  modified_base 87: mod_base = OTHER; note = 2'-O-methyl modified nucleotide
  modified_base 88: mod_base = OTHER; note = 2'-O-methyl modified nucleotide
  modified_base 89: mod_base = OTHER; note = 2'-O-methyl modified nucleotide
  modified_base 90: mod_base = OTHER; note = 2'-O-methyl modified nucleotide
  modified_base 91: mod_base = OTHER; note = 2'-O-methyl modified nucleotide
  modified_base 92: mod_base = OTHER; note = 2'-O-methyl modified nucleotide
  modified_base 93: mod_base = OTHER; note = 2'-O-methyl modified nucleotide
  modified_base 94: mod_base = OTHER; note = 2'-O-methyl modified nucleotide
  modified_base 95: mod_base = OTHER; note = 2'-O-methyl modified nucleotide
  modified_base 96: mod_base = OTHER; note = 2'-O-methyl modified nucleotide
  modified_base 97: mod_base = OTHER; note = 2'-O-methyl modified nucleotide with phosphorothioate linkage
  modified_base 98: mod_base = OTHER; note = 2'-O-methyl modified nucleotide with phosphorothioate linkage
  modified_base 99: mod_base = OTHER; note = 2'-O-methyl modified nucleotide with phosphorothioate linkage
  modified_base 100: mod_base = OTHER; note = 2'-O-methyl modified nucleotide

SEQ ID NO: 148 - RNA, 100 nt, synthetic construct; identical to SEQ ID NO: 126
  source 1..100: mol_type = other RNA; note = Description of Artificial Sequence: Synthetic polynucleotide
  modified_base 1: mod_base = OTHER; note = 2'-O-methyl modified nucleotide with phosphorothioate linkage
  modified_base 2: mod_base = OTHER; note = 2'-O-methyl modified nucleotide with phosphorothioate linkage
  modified_base 3: mod_base = OTHER; note = 2'-O-methyl modified nucleotide with phosphorothioate linkage
  modified_base 29: mod_base = OTHER; note = 2'-O-methyl modified nucleotide
  modified_base 30: mod_base = OTHER; note = 2'-O-methyl modified nucleotide
  modified_base 31: mod_base = OTHER; note = 2'-O-methyl modified nucleotide
  modified_base 32: mod_base = OTHER; note = 2'-O-methyl modified nucleotide
  modified_base 33: mod_base = OTHER; note = 2'-O-methyl modified nucleotide
  modified_base 34: mod_base = OTHER; note = 2'-O-methyl modified nucleotide
  modified_base 35: mod_base = OTHER; note = 2'-O-methyl modified nucleotide
  modified_base 36: mod_base = OTHER; note = 2'-O-methyl modified nucleotide
  modified_base 37: mod_base = OTHER; note = 2'-O-methyl modified nucleotide
  modified_base 38: mod_base = OTHER; note = 2'-O-methyl modified nucleotide
  modified_base 39: mod_base = OTHER; note = 2'-O-methyl modified nucleotide
  modified_base 40: mod_base = OTHER; note = 2'-O-methyl modified nucleotide
  modified_base 69: mod_base = OTHER; note = 2'-O-methyl modified nucleotide
  modified_base 70: mod_base = OTHER; note = 2'-O-methyl modified nucleotide
  modified_base 71: mod_base = OTHER; note = 2'-O-methyl modified nucleotide
  modified_base 72: mod_base = OTHER; note = 2'-O-methyl modified nucleotide
  modified_base 73: mod_base = OTHER; note = 2'-O-methyl modified nucleotide
  modified_base 74: mod_base = OTHER; note = 2'-O-methyl modified nucleotide
  modified_base 75: mod_base = OTHER; note = 2'-O-methyl modified nucleotide
  modified_base 76: mod_base = OTHER; note = 2'-O-methyl modified nucleotide
  modified_base 77: mod_base = OTHER; note = 2'-O-methyl modified nucleotide
  modified_base 78: mod_base = OTHER; note = 2'-O-methyl modified nucleotide
  modified_base 79: mod_base = OTHER; note = 2'-O-methyl modified nucleotide
  modified_base 80: mod_base = OTHER; note = 2'-O-methyl modified nucleotide
  modified_base 81: mod_base = OTHER; note = 2'-O-methyl modified nucleotide
  modified_base 82: mod_base = OTHER; note = 2'-O-methyl modified nucleotide
  modified_base 83: mod_base = OTHER; note = 2'-O-methyl modified nucleotide
  modified_base 84: mod_base = OTHER; note = 2'-O-methyl modified nucleotide
  modified_base 85: mod_base = OTHER; note = 2'-O-methyl modified nucleotide
  modified_base 86: mod_base = OTHER; note = 2'-O-methyl modified nucleotide
  modified_base 87: mod_base = OTHER; note = 2'-O-methyl modified nucleotide
  modified_base 88: mod_base = OTHER; note = 2'-O-methyl modified nucleotide
  modified_base 89: mod_base = OTHER; note = 2'-O-methyl modified nucleotide
  modified_base 90: mod_base = OTHER; note = 2'-O-methyl modified nucleotide
  modified_base 91: mod_base = OTHER; note = 2'-O-methyl modified nucleotide
  modified_base 92: mod_base = OTHER; note = 2'-O-methyl modified nucleotide
  modified_base 93: mod_base = OTHER; note = 2'-O-methyl modified nucleotide
  modified_base 94: mod_base = OTHER; note = 2'-O-methyl modified nucleotide
  modified_base 95: mod_base = OTHER; note = 2'-O-methyl modified nucleotide
  modified_base 96: mod_base = OTHER; note = 2'-O-methyl modified nucleotide
  modified_base 97: mod_base = OTHER; note = 2'-O-methyl modified nucleotide with phosphorothioate linkage
  modified_base 98: mod_base = OTHER; note = 2'-O-methyl modified nucleotide with phosphorothioate linkage
  modified_base 99: mod_base = OTHER; note = 2'-O-methyl modified nucleotide with phosphorothioate linkage
  modified_base 100: mod_base = OTHER; note = 2'-O-methyl modified nucleotide

SEQ ID NO: 149 - RNA, 100 nt, synthetic construct; identical to SEQ ID NO: 127
  source 1..100: mol_type = other RNA; note = Description of Artificial Sequence: Synthetic polynucleotide
  modified_base 1: mod_base = OTHER; note = 2'-O-methyl modified nucleotide with phosphorothioate linkage
  modified_base 2: mod_base = OTHER; note = 2'-O-methyl modified nucleotide with phosphorothioate linkage
  modified_base 3: mod_base = OTHER; note = 2'-O-methyl modified nucleotide with phosphorothioate linkage
  modified_base 29: mod_base = OTHER; note = 2'-O-methyl modified nucleotide
  modified_base 30: mod_base = OTHER; note = 2'-O-methyl modified nucleotide
  modified_base 31: mod_base = OTHER; note = 2'-O-methyl modified nucleotide
  modified_base 32: mod_base = OTHER; note = 2'-O-methyl modified nucleotide
  modified_base 33: mod_base = OTHER; note = 2'-O-methyl modified nucleotide
  modified_base 34: mod_base = OTHER; note = 2'-O-methyl modified nucleotide
  modified_base 35: mod_base = OTHER; note = 2'-O-methyl modified nucleotide
  modified_base 36: mod_base = OTHER; note = 2'-O-methyl modified nucleotide
  modified_base 37: mod_base = OTHER; note = 2'-O-methyl modified nucleotide
  modified_base 38: mod_base = OTHER; note = 2'-O-methyl modified nucleotide
  modified_base 39: mod_base = OTHER; note = 2'-O-methyl modified nucleotide
  modified_base 40: mod_base = OTHER; note = 2'-O-methyl modified nucleotide
  modified_base 69: mod_base = OTHER; note = 2'-O-methyl modified nucleotide
  modified_base 70: mod_base = OTHER; note = 2'-O-methyl modified nucleotide
  modified_base 71: mod_base = OTHER; note = 2'-O-methyl modified nucleotide
  modified_base 72: mod_base = OTHER; note = 2'-O-methyl modified nucleotide
  modified_base 73: mod_base = OTHER; note = 2'-O-methyl modified nucleotide
  modified_base 74: mod_base = OTHER; note = 2'-O-methyl modified nucleotide
  modified_base 75: mod_base = OTHER; note = 2'-O-methyl modified nucleotide
  modified_base 76: mod_base = OTHER; note = 2'-O-methyl modified nucleotide
  modified_base 77: mod_base = OTHER; note = 2'-O-methyl modified nucleotide
  modified_base 78: mod_base = OTHER; note = 2'-O-methyl modified nucleotide
  modified_base 79: mod_base = OTHER; note = 2'-O-methyl modified nucleotide
  modified_base 80: mod_base = OTHER; note = 2'-O-methyl modified nucleotide
  modified_base 81: mod_base = OTHER; note = 2'-O-methyl modified nucleotide
  modified_base 82: mod_base = OTHER; note = 2'-O-methyl modified nucleotide
  modified_base 83: mod_base = OTHER; note = 2'-O-methyl modified nucleotide
  modified_base 84: mod_base = OTHER; note = 2'-O-methyl modified nucleotide
  modified_base 85: mod_base = OTHER; note = 2'-O-methyl modified nucleotide
  modified_base 86: mod_base = OTHER; note = 2'-O-methyl modified nucleotide
  modified_base 87: mod_base = OTHER; note = 2'-O-methyl modified nucleotide
  modified_base 88: mod_base = OTHER; note = 2'-O-methyl modified nucleotide
  modified_base 89: mod_base = OTHER; note = 2'-O-methyl modified nucleotide
  modified_base 90: mod_base = OTHER; note = 2'-O-methyl modified nucleotide
  modified_base 91: mod_base = OTHER; note = 2'-O-methyl modified nucleotide
  modified_base 92: mod_base = OTHER; note = 2'-O-methyl modified nucleotide
  modified_base 93: mod_base = OTHER; note = 2'-O-methyl modified nucleotide
  modified_base 94: mod_base = OTHER; note = 2'-O-methyl modified nucleotide
  modified_base 95: mod_base = OTHER; note = 2'-O-methyl modified nucleotide
  modified_base 96: mod_base = OTHER; note = 2'-O-methyl modified nucleotide
  modified_base 97: mod_base = OTHER; note = 2'-O-methyl modified nucleotide with phosphorothioate linkage
  modified_base 98: mod_base = OTHER; note = 2'-O-methyl modified nucleotide with phosphorothioate linkage
  modified_base 99: mod_base = OTHER; note = 2'-O-methyl modified nucleotide with phosphorothioate linkage
  modified_base 100: mod_base = OTHER; note = 2'-O-methyl modified nucleotide

SEQ ID NO: 150 - RNA, 100 nt, synthetic construct; identical to SEQ ID NO: 128
  source 1..100: mol_type = other RNA; note = Description of Artificial Sequence: Synthetic polynucleotide
  modified_base 1: mod_base = OTHER; note = 2'-O-methyl modified nucleotide with phosphorothioate linkage
  modified_base 2: mod_base = OTHER; note = 2'-O-methyl modified nucleotide with phosphorothioate linkage
  modified_base 3: mod_base = OTHER; note = 2'-O-methyl modified nucleotide with phosphorothioate linkage
  modified_base 29: mod_base = OTHER; note = 2'-O-methyl modified nucleotide
  modified_base 30: mod_base = OTHER; note = 2'-O-methyl modified nucleotide
  modified_base 31: mod_base = OTHER; note = 2'-O-methyl modified nucleotide
  modified_base 32: mod_base = OTHER; note = 2'-O-methyl modified nucleotide
  modified_base 33: mod_base = OTHER; note = 2'-O-methyl modified nucleotide
  modified_base 34: mod_base = OTHER; note = 2'-O-methyl modified nucleotide
  modified_base 35: mod_base = OTHER; note = 2'-O-methyl modified nucleotide
  modified_base 36: mod_base = OTHER; note = 2'-O-methyl modified nucleotide
  modified_base 37: mod_base = OTHER; note = 2'-O-methyl modified nucleotide
  modified_base 38: mod_base = OTHER; note = 2'-O-methyl modified nucleotide
  modified_base 39: mod_base = OTHER; note = 2'-O-methyl modified nucleotide
  modified_base 40: mod_base = OTHER; note = 2'-O-methyl modified nucleotide
  modified_base 69: mod_base = OTHER; note = 2'-O-methyl modified nucleotide
  modified_base 70: mod_base = OTHER; note = 2'-O-methyl modified nucleotide
  modified_base 71: mod_base = OTHER; note = 2'-O-methyl modified nucleotide
  modified_base 72: mod_base = OTHER; note = 2'-O-methyl modified nucleotide
  modified_base 73: mod_base = OTHER; note = 2'-O-methyl modified nucleotide
  modified_base 74: mod_base = OTHER; note = 2'-O-methyl modified nucleotide
  modified_base 75: mod_base = OTHER; note = 2'-O-methyl modified nucleotide
  modified_base 76: mod_base = OTHER; note = 2'-O-methyl modified nucleotide
  modified_base 77: mod_base = OTHER; note = 2'-O-methyl modified nucleotide
  modified_base 78: mod_base = OTHER; note = 2'-O-methyl modified nucleotide
  modified_base 79: mod_base = OTHER; note = 2'-O-methyl modified nucleotide
  modified_base 80: mod_base = OTHER; note = 2'-O-methyl modified nucleotide
  modified_base 81: mod_base = OTHER; note = 2'-O-methyl modified nucleotide
  modified_base 82: mod_base = OTHER; note = 2'-O-methyl modified nucleotide
  modified_base 83: mod_base = OTHER; note = 2'-O-methyl modified nucleotide
  modified_base 84: mod_base = OTHER; note = 2'-O-methyl modified nucleotide
  modified_base 85: mod_base = OTHER; note = 2'-O-methyl modified nucleotide
  modified_base 86: mod_base = OTHER; note = 2'-O-methyl modified nucleotide
  modified_base 87: mod_base = OTHER; note = 2'-O-methyl modified nucleotide
  modified_base 88: mod_base = OTHER; note = 2'-O-methyl modified nucleotide
  modified_base 89: mod_base = OTHER; note = 2'-O-methyl modified nucleotide
  modified_base 90: mod_base = OTHER; note = 2'-O-methyl modified nucleotide
  modified_base 91: mod_base = OTHER; note = 2'-O-methyl modified nucleotide
  modified_base 92: mod_base = OTHER; note = 2'-O-methyl modified nucleotide
  modified_base 93: mod_base = OTHER; note = 2'-O-methyl modified nucleotide
  modified_base 94: mod_base = OTHER; note = 2'-O-methyl modified nucleotide
  modified_base 95: mod_base = OTHER; note = 2'-O-methyl modified nucleotide
  modified_base 96: mod_base = OTHER; note = 2'-O-methyl modified nucleotide
  modified_base 97: mod_base = OTHER; note = 2'-O-methyl modified nucleotide with phosphorothioate linkage
  modified_base 98: mod_base = OTHER; note = 2'-O-methyl modified nucleotide with phosphorothioate linkage
  modified_base 99: mod_base = OTHER; note = 2'-O-methyl modified nucleotide with phosphorothioate linkage
  modified_base 100: mod_base = OTHER; note = 2'-O-methyl modified nucleotide

SEQ ID NO: 151 - RNA, 100 nt, synthetic construct; identical to SEQ ID NO: 129
  source 1..100: mol_type = other RNA; note = Description of Artificial Sequence: Synthetic polynucleotide
  modified_base 1: mod_base = OTHER; note = 2'-O-methyl modified nucleotide with phosphorothioate linkage
  modified_base 2: mod_base = OTHER; note = 2'-O-methyl modified nucleotide with phosphorothioate linkage
  modified_base 3: mod_base = OTHER; note = 2'-O-methyl modified nucleotide with phosphorothioate linkage
  modified_base 29: mod_base = OTHER; note = 2'-O-methyl modified nucleotide
  modified_base 30: mod_base = OTHER; note = 2'-O-methyl modified nucleotide
  modified_base 31: mod_base = OTHER; note = 2'-O-methyl modified nucleotide
  modified_base 32: mod_base = OTHER; note = 2'-O-methyl modified nucleotide
  modified_base 33: mod_base = OTHER; note = 2'-O-methyl modified nucleotide
  modified_base 34: mod_base = OTHER; note = 2'-O-methyl modified nucleotide
  modified_base 35: mod_base = OTHER; note = 2'-O-methyl modified nucleotide
  modified_base 36: mod_base = OTHER; note = 2'-O-methyl modified nucleotide
  modified_base 37: mod_base = OTHER; note = 2'-O-methyl modified nucleotide
  modified_base 38: mod_base = OTHER; note = 2'-O-methyl modified nucleotide
  modified_base 39: mod_base = OTHER; note = 2'-O-methyl modified nucleotide
  modified_base 40: mod_base = OTHER; note = 2'-O-methyl modified nucleotide
  modified_base 69: mod_base = OTHER; note = 2'-O-methyl modified nucleotide
  modified_base 70: mod_base = OTHER; note = 2'-O-methyl modified nucleotide
  modified_base 71: mod_base = OTHER; note = 2'-O-methyl modified nucleotide
  modified_base 72: mod_base = OTHER; note = 2'-O-methyl modified nucleotide
  modified_base 73: mod_base = OTHER; note = 2'-O-methyl modified nucleotide
  modified_base 74: mod_base = OTHER; note = 2'-O-methyl modified nucleotide
  modified_base 75: mod_base = OTHER; note = 2'-O-methyl modified nucleotide
  modified_base 76: mod_base = OTHER; note = 2'-O-methyl modified nucleotide
  modified_base 77: mod_base = OTHER; note = 2'-O-methyl modified nucleotide
  modified_base 78: mod_base = OTHER; note = 2'-O-methyl modified nucleotide
  modified_base 79: mod_base = OTHER; note = 2'-O-methyl modified nucleotide
  modified_base 80: mod_base = OTHER; note = 2'-O-methyl modified nucleotide
  modified_base 81: mod_base = OTHER; note = 2'-O-methyl modified nucleotide
  modified_base 82: mod_base = OTHER; note = 2'-O-methyl modified nucleotide
  modified_base 83: mod_base = OTHER; note = 2'-O-methyl modified nucleotide
  modified_base 84: mod_base = OTHER; note = 2'-O-methyl modified nucleotide
  modified_base 85: mod_base = OTHER; note = 2'-O-methyl modified nucleotide
  modified_base 86: mod_base = OTHER; note = 2'-O-methyl modified nucleotide
  modified_base 87: mod_base = OTHER; note = 2'-O-methyl modified nucleotide
  modified_base 88: mod_base = OTHER; note = 2'-O-methyl modified nucleotide
  modified_base 89: mod_base = OTHER; note = 2'-O-methyl modified nucleotide
  modified_base 90: mod_base = OTHER; note = 2'-O-methyl modified nucleotide
  modified_base 91: mod_base = OTHER; note = 2'-O-methyl modified nucleotide
  modified_base 92: mod_base = OTHER; note = 2'-O-methyl modified nucleotide
  modified_base 93: mod_base = OTHER; note = 2'-O-methyl modified nucleotide
  modified_base 94: mod_base = OTHER; note = 2'-O-methyl modified nucleotide
  modified_base 95: mod_base = OTHER; note = 2'-O-methyl modified nucleotide
  modified_base 96: mod_base = OTHER; note = 2'-O-methyl modified nucleotide
  modified_base 97: mod_base = OTHER; note = 2'-O-methyl modified nucleotide with phosphorothioate linkage
  modified_base 98: mod_base = OTHER; note = 2'-O-methyl modified nucleotide with phosphorothioate linkage
  modified_base 99: mod_base = OTHER; note = 2'-O-methyl modified nucleotide with phosphorothioate linkage
  modified_base 100: mod_base = OTHER; note = 2'-O-methyl modified nucleotide

SEQ ID NO: 152 - RNA, 100 nt, synthetic construct; identical to SEQ ID NO: 130
  source 1..100: mol_type = other RNA; note = Description of Artificial Sequence: Synthetic polynucleotide
  modified_base 1: mod_base = OTHER; note = 2'-O-methyl modified nucleotide with phosphorothioate linkage
  modified_base 2: mod_base = OTHER; note = 2'-O-methyl modified nucleotide with phosphorothioate linkage
  modified_base 3: mod_base = OTHER; note = 2'-O-methyl modified nucleotide with phosphorothioate linkage
  modified_base 29: mod_base = OTHER; note = 2'-O-methyl modified nucleotide
  modified_base 30: mod_base = OTHER; note = 2'-O-methyl modified nucleotide
  modified_base 31: mod_base = OTHER; note = 2'-O-methyl modified nucleotide
  modified_base 32: mod_base = OTHER; note = 2'-O-methyl modified nucleotide
  modified_base 33: mod_base = OTHER; note = 2'-O-methyl modified nucleotide
  modified_base 34: mod_base = OTHER; note = 2'-O-methyl modified nucleotide
  modified_base 35: mod_base = OTHER; note = 2'-O-methyl modified nucleotide
  modified_base 36: mod_base = OTHER; note = 2'-O-methyl modified nucleotide
  modified_base 37: mod_base = OTHER; note = 2'-O-methyl modified nucleotide
  modified_base 38: mod_base = OTHER; note = 2'-O-methyl modified nucleotide
  modified_base 39: mod_base = OTHER; note = 2'-O-methyl modified nucleotide
  modified_base 40: mod_base = OTHER; note = 2'-O-methyl modified nucleotide
  modified_base 69: mod_base = OTHER; note = 2'-O-methyl modified nucleotide
  modified_base 70: mod_base = OTHER; note = 2'-O-methyl modified nucleotide
  modified_base 71: mod_base = OTHER; note = 2'-O-methyl modified nucleotide
  modified_base 72: mod_base = OTHER; note = 2'-O-methyl modified nucleotide
  modified_base 73: mod_base = OTHER; note = 2'-O-methyl modified nucleotide
  modified_base 74: mod_base = OTHER; note = 2'-O-methyl modified nucleotide
  modified_base 75: mod_base = OTHER; note = 2'-O-methyl modified nucleotide
  modified_base 76: mod_base = OTHER; note = 2'-O-methyl modified nucleotide
  modified_base 77: mod_base = OTHER; note = 2'-O-methyl modified nucleotide
  modified_base 78: mod_base = OTHER; note = 2'-O-methyl modified nucleotide
  modified_base 79: mod_base = OTHER; note = 2'-O-methyl modified nucleotide
  modified_base 80: mod_base = OTHER; note = 2'-O-methyl modified nucleotide
  modified_base 81: mod_base = OTHER; note = 2'-O-methyl modified nucleotide
  modified_base 82: mod_base = OTHER; note = 2'-O-methyl modified nucleotide
  modified_base 83: mod_base = OTHER; note = 2'-O-methyl modified nucleotide
  modified_base 84: mod_base = OTHER; note = 2'-O-methyl modified nucleotide
  modified_base 85: mod_base = OTHER; note = 2'-O-methyl modified nucleotide
  modified_base 86: mod_base = OTHER; note = 2'-O-methyl modified nucleotide
  modified_base 87: mod_base = OTHER; note = 2'-O-methyl modified nucleotide
  modified_base 88: mod_base = OTHER; note = 2'-O-methyl modified nucleotide
  modified_base 89: mod_base = OTHER; note = 2'-O-methyl modified nucleotide
  modified_base 90: mod_base = OTHER; note = 2'-O-methyl modified nucleotide
  modified_base 91: mod_base = OTHER; note = 2'-O-methyl modified nucleotide
  modified_base 92: mod_base = OTHER; note = 2'-O-methyl modified nucleotide
  modified_base 93: mod_base = OTHER; note = 2'-O-methyl modified nucleotide
  modified_base 94: mod_base = OTHER; note = 2'-O-methyl modified nucleotide
  modified_base 95: mod_base = OTHER; note = 2'-O-methyl modified nucleotide
  modified_base 96: mod_base = OTHER; note = 2'-O-methyl modified nucleotide
  modified_base 97: mod_base = OTHER; note = 2'-O-methyl modified nucleotide with phosphorothioate linkage
  modified_base 98: mod_base = OTHER; note = 2'-O-methyl modified nucleotide with phosphorothioate linkage
  modified_base 99: mod_base = OTHER; note = 2'-O-methyl modified nucleotide with phosphorothioate linkage
  modified_base 100: mod_base = OTHER; note = 2'-O-methyl modified nucleotide

SEQ ID NO: 153 - RNA, 100 nt, synthetic construct; identical to SEQ ID NO: 131
  source 1..100: mol_type = other RNA; note = Description of Artificial Sequence: Synthetic polynucleotide
  modified_base 1: mod_base = OTHER; note = 2'-O-methyl modified nucleotide with phosphorothioate linkage
  modified_base 2: mod_base = OTHER; note = 2'-O-methyl modified nucleotide with phosphorothioate linkage
  modified_base 3: mod_base = OTHER; note = 2'-O-methyl modified nucleotide with phosphorothioate linkage
  modified_base 29: mod_base = OTHER; note = 2'-O-methyl modified nucleotide
  modified_base 30: mod_base = OTHER; note = 2'-O-methyl modified nucleotide
  modified_base 31: mod_base = OTHER; note = 2'-O-methyl modified nucleotide
  modified_base 32: mod_base = OTHER; note = 2'-O-methyl modified nucleotide
  modified_base 33: mod_base = OTHER; note = 2'-O-methyl modified nucleotide
  modified_base 34: mod_base = OTHER; note = 2'-O-methyl modified nucleotide
  modified_base 35: mod_base = OTHER; note = 2'-O-methyl modified nucleotide
  modified_base 36: mod_base = OTHER; note = 2'-O-methyl modified nucleotide
  modified_base 37: mod_base = OTHER; note = 2'-O-methyl modified nucleotide
  modified_base 38: mod_base = OTHER; note = 2'-O-methyl modified nucleotide
  modified_base 39: mod_base = OTHER; note = 2'-O-methyl modified nucleotide
  modified_base 40: mod_base = OTHER; note = 2'-O-methyl modified nucleotide
  modified_base 69: mod_base = OTHER; note = 2'-O-methyl modified nucleotide
  modified_base 70: mod_base = OTHER; note = 2'-O-methyl modified nucleotide
  modified_base 71: mod_base = OTHER; note = 2'-O-methyl modified nucleotide
  modified_base 72: mod_base = OTHER; note = 2'-O-methyl modified nucleotide
  modified_base 73: mod_base = OTHER; note = 2'-O-methyl modified nucleotide
  modified_base 74: mod_base = OTHER; note = 2'-O-methyl modified nucleotide
  modified_base 75: mod_base = OTHER; note = 2'-O-methyl modified nucleotide
  modified_base 76: mod_base = OTHER; note = 2'-O-methyl modified nucleotide
  modified_base 77: mod_base = OTHER; note = 2'-O-methyl modified nucleotide
  modified_base 78: mod_base = OTHER; note = 2'-O-methyl modified nucleotide
  modified_base 79: mod_base = OTHER; note = 2'-O-methyl modified nucleotide
  modified_base 80: mod_base = OTHER; note = 2'-O-methyl modified nucleotide
  modified_base 81: mod_base = OTHER; note = 2'-O-methyl modified nucleotide
  modified_base 82: mod_base = OTHER; note = 2'-O-methyl modified nucleotide
  modified_base 83: mod_base = OTHER; note = 2'-O-methyl modified nucleotide
  modified_base 84: mod_base = OTHER; note = 2'-O-methyl modified nucleotide
  modified_base 85: mod_base = OTHER; note = 2'-O-methyl modified nucleotide
  modified_base 86: mod_base = OTHER; note = 2'-O-methyl modified nucleotide
  modified_base 87: mod_base = OTHER; note = 2'-O-methyl modified nucleotide
  modified_base 88: mod_base = OTHER; note = 2'-O-methyl modified nucleotide
  modified_base 89: mod_base = OTHER; note = 2'-O-methyl modified nucleotide
  modified_base 90: mod_base = OTHER; note = 2'-O-methyl modified nucleotide
  modified_base 91: mod_base = OTHER; note = 2'-O-methyl modified nucleotide
  modified_base 92: mod_base = OTHER; note = 2'-O-methyl modified nucleotide
  modified_base 93: mod_base = OTHER; note = 2'-O-methyl modified nucleotide
  modified_base 94: mod_base = OTHER; note = 2'-O-methyl modified nucleotide
  modified_base 95: mod_base = OTHER; note = 2'-O-methyl modified nucleotide
  modified_base 96: mod_base = OTHER; note = 2'-O-methyl modified nucleotide
  modified_base 97: mod_base = OTHER; note = 2'-O-methyl modified nucleotide with phosphorothioate linkage
  modified_base 98: mod_base = OTHER; note = 2'-O-methyl modified nucleotide with phosphorothioate linkage
  modified_base 99: mod_base = OTHER; note = 2'-O-methyl modified nucleotide with phosphorothioate linkage
  modified_base 100: mod_base = OTHER; note = 2'-O-methyl modified nucleotide

SEQ ID NO: 154 - RNA, 100 nt, synthetic construct; identical to SEQ ID NO: 132
  source 1..100: mol_type = other RNA; note = Description of Artificial Sequence: Synthetic polynucleotide
  modified_base 1: mod_base = OTHER; note = 2'-O-methyl modified nucleotide with phosphorothioate linkage
  modified_base 2: mod_base = OTHER; note = 2'-O-methyl modified nucleotide with phosphorothioate linkage
  modified_base 3: mod_base = OTHER; note = 2'-O-methyl modified nucleotide with phosphorothioate linkage
  modified_base 29: mod_base = OTHER; note = 2'-O-methyl modified nucleotide
  modified_base 30: mod_base = OTHER; note = 2'-O-methyl modified nucleotide
  modified_base 31: mod_base = OTHER; note = 2'-O-methyl modified nucleotide
  modified_base 32: mod_base = OTHER; note = 2'-O-methyl modified nucleotide
  modified_base 33: mod_base = OTHER; note = 2'-O-methyl modified nucleotide
  modified_base 34: mod_base = OTHER; note = 2'-O-methyl modified nucleotide
  modified_base 35: mod_base = OTHER; note = 2'-O-methyl modified nucleotide
  modified_base 36: mod_base = OTHER; note = 2'-O-methyl modified nucleotide
  modified_base 37: mod_base = OTHER; note = 2'-O-methyl modified nucleotide
  modified_base 38: mod_base = OTHER; note = 2'-O-methyl modified nucleotide
  modified_base 39: mod_base = OTHER; note = 2'-O-methyl modified nucleotide
  modified_base 40: mod_base = OTHER; note = 2'-O-methyl modified nucleotide
  modified_base 69: mod_base = OTHER; note = 2'-O-methyl modified nucleotide
  modified_base 70: mod_base = OTHER; note = 2'-O-methyl modified nucleotide
  modified_base 71: mod_base = OTHER; note = 2'-O-methyl modified nucleotide
  modified_base 72: mod_base = OTHER; note = 2'-O-methyl modified nucleotide
  modified_base 73: mod_base = OTHER; note = 2'-O-methyl modified nucleotide
  modified_base 74: mod_base = OTHER; note = 2'-O-methyl modified nucleotide
  modified_base 75: mod_base = OTHER; note = 2'-O-methyl modified nucleotide
  modified_base 76: mod_base = OTHER; note = 2'-O-methyl modified nucleotide
  modified_base 77: mod_base = OTHER; note = 2'-O-methyl modified nucleotide
  modified_base 78: mod_base = OTHER; note = 2'-O-methyl modified nucleotide
  modified_base 79: mod_base = OTHER; note = 2'-O-methyl modified nucleotide
  modified_base 80: mod_base = OTHER; note = 2'-O-methyl modified nucleotide
  modified_base 81: mod_base = OTHER; note = 2'-O-methyl modified nucleotide
  modified_base 82: mod_base = OTHER; note = 2'-O-methyl modified nucleotide
  modified_base 83: mod_base = OTHER; note = 2'-O-methyl modified nucleotide
  modified_base 84: mod_base = OTHER; note = 2'-O-methyl modified nucleotide
  modified_base 85: mod_base = OTHER; note = 2'-O-methyl modified nucleotide
  modified_base 86: mod_base = OTHER; note = 2'-O-methyl modified nucleotide
  modified_base 87: mod_base = OTHER; note = 2'-O-methyl modified nucleotide
  modified_base 88: mod_base = OTHER; note = 2'-O-methyl modified nucleotide
  modified_base 89: mod_base = OTHER; note = 2'-O-methyl modified nucleotide
  modified_base 90: mod_base = OTHER; note = 2'-O-methyl modified nucleotide
  modified_base 91: mod_base = OTHER; note = 2'-O-methyl modified nucleotide
  modified_base 92: mod_base = OTHER; note = 2'-O-methyl modified nucleotide
  modified_base 93: mod_base = OTHER; note = 2'-O-methyl modified nucleotide
  modified_base 94: mod_base = OTHER; note = 2'-O-methyl modified nucleotide
  modified_base 95: mod_base = OTHER; note = 2'-O-methyl modified nucleotide
  modified_base 96: mod_base = OTHER; note = 2'-O-methyl modified nucleotide
  modified_base 97: mod_base = OTHER; note = 2'-O-methyl modified nucleotide with phosphorothioate linkage
  modified_base 98: mod_base = OTHER; note = 2'-O-methyl modified nucleotide with phosphorothioate linkage
  modified_base 99: mod_base = OTHER; note = 2'-O-methyl modified nucleotide with phosphorothioate linkage
  modified_base 100: mod_base = OTHER; note = 2'-O-methyl modified nucleotide

SEQ ID NO: 155 - RNA, 100 nt, synthetic construct; identical to SEQ ID NO: 133
  source 1..100: mol_type = other RNA; note = Description of Artificial Sequence: Synthetic polynucleotide
  modified_base 1: mod_base = OTHER; note = 2'-O-methyl modified nucleotide with phosphorothioate linkage
  modified_base 2: mod_base = OTHER; note = 2'-O-methyl modified nucleotide with phosphorothioate linkage
  modified_base 3: mod_base = OTHER; note = 2'-O-methyl modified nucleotide with phosphorothioate linkage
  modified_base 29: mod_base = OTHER; note = 2'-O-methyl modified nucleotide
  modified_base 30: mod_base = OTHER; note = 2'-O-methyl modified nucleotide
  modified_base 31: mod_base = OTHER; note = 2'-O-methyl modified nucleotide
  modified_base 32: mod_base = OTHER; note = 2'-O-methyl modified nucleotide
  modified_base 33: mod_base = OTHER; note = 2'-O-methyl modified nucleotide
  modified_base 34: mod_base = OTHER; note = 2'-O-methyl modified nucleotide
  modified_base 35: mod_base = OTHER; note = 2'-O-methyl modified nucleotide
  modified_base 36: mod_base = OTHER; note = 2'-O-methyl modified nucleotide
  modified_base 37: mod_base = OTHER; note = 2'-O-methyl modified nucleotide
  modified_base 38: mod_base = OTHER; note = 2'-O-methyl modified nucleotide
  modified_base 39: mod_base = OTHER; note = 2'-O-methyl modified nucleotide
  modified_base 40: mod_base = OTHER; note = 2'-O-methyl modified nucleotide
  modified_base 69: mod_base = OTHER; note = 2'-O-methyl modified nucleotide
  modified_base 70: mod_base = OTHER; note = 2'-O-methyl modified nucleotide
  modified_base 71: mod_base = OTHER; note = 2'-O-methyl modified nucleotide
  modified_base 72: mod_base = OTHER; note = 2'-O-methyl modified nucleotide
  modified_base 73: mod_base = OTHER; note = 2'-O-methyl modified nucleotide
  modified_base 74: mod_base = OTHER; note = 2'-O-methyl modified nucleotide
  modified_base 75: mod_base = OTHER; note = 2'-O-methyl modified nucleotide
  modified_base 76: mod_base = OTHER; note = 2'-O-methyl modified nucleotide
  modified_base 77: mod_base = OTHER; note = 2'-O-methyl modified nucleotide
  modified_base 78: mod_base = OTHER; note = 2'-O-methyl modified nucleotide
  modified_base 79: mod_base = OTHER; note = 2'-O-methyl modified nucleotide
  modified_base 80: mod_base = OTHER; note = 2'-O-methyl modified nucleotide
  modified_base 81: mod_base = OTHER; note = 2'-O-methyl modified nucleotide
  modified_base 82: mod_base = OTHER; note = 2'-O-methyl modified nucleotide
  modified_base 83: mod_base = OTHER; note = 2'-O-methyl modified nucleotide
  modified_base 84: mod_base = OTHER; note = 2'-O-methyl modified nucleotide
  modified_base 85: mod_base = OTHER; note = 2'-O-methyl modified nucleotide
  modified_base 86: mod_base = OTHER; note = 2'-O-methyl modified nucleotide
  modified_base 87: mod_base = OTHER; note = 2'-O-methyl modified nucleotide
  modified_base 88: mod_base = OTHER; note = 2'-O-methyl modified nucleotide
  modified_base 89: mod_base = OTHER; note = 2'-O-methyl modified nucleotide
  modified_base 90: mod_base = OTHER; note = 2'-O-methyl modified nucleotide
  modified_base 91: mod_base = OTHER; note = 2'-O-methyl modified nucleotide
  modified_base 92: mod_base = OTHER; note = 2'-O-methyl modified nucleotide
  modified_base 93: mod_base = OTHER; note = 2'-O-methyl modified nucleotide
  modified_base 94: mod_base = OTHER; note = 2'-O-methyl modified nucleotide
  modified_base 95: mod_base = OTHER; note = 2'-O-methyl modified nucleotide
  modified_base 96: mod_base = OTHER; note = 2'-O-methyl modified nucleotide
  modified_base 97: mod_base = OTHER; note = 2'-O-methyl modified nucleotide with phosphorothioate linkage
  modified_base 98: mod_base = OTHER; note = 2'-O-methyl modified nucleotide with phosphorothioate linkage
  modified_base 99: mod_base = OTHER; note = 2'-O-methyl modified nucleotide with phosphorothioate linkage
  modified_base 100: mod_base = OTHER; note = 2'-O-methyl modified nucleotide

SEQ ID NO: 156 - RNA, 100 nt, synthetic construct; identical to SEQ ID NO: 134
  source 1..100: mol_type = other RNA; note = Description of Artificial Sequence: Synthetic polynucleotide
  modified_base 1: mod_base = OTHER; note = 2'-O-methyl modified nucleotide with phosphorothioate linkage
  modified_base 2: mod_base = OTHER; note = 2'-O-methyl modified nucleotide with phosphorothioate linkage
  modified_base 3: mod_base = OTHER; note = 2'-O-methyl modified nucleotide with phosphorothioate linkage
  modified_base 29: mod_base = OTHER; note = 2'-O-methyl modified nucleotide
  modified_base 30: mod_base = OTHER; note = 2'-O-methyl modified nucleotide
  modified_base 31: mod_base = OTHER; note = 2'-O-methyl modified nucleotide
  modified_base 32: mod_base = OTHER; note = 2'-O-methyl modified nucleotide
  modified_base 33: mod_base = OTHER; note = 2'-O-methyl modified nucleotide
  modified_base 34: mod_base = OTHER; note = 2'-O-methyl modified nucleotide
  modified_base 35: mod_base = OTHER; note = 2'-O-methyl modified nucleotide
  modified_base 36: mod_base = OTHER; note = 2'-O-methyl modified nucleotide
  modified_base 37: mod_base = OTHER; note = 2'-O-methyl modified nucleotide
  modified_base 38: mod_base = OTHER; note = 2'-O-methyl modified nucleotide
  modified_base 39: mod_base = OTHER; note = 2'-O-methyl modified nucleotide
  modified_base 40: mod_base = OTHER; note = 2'-O-methyl modified nucleotide
  modified_base 69: mod_base = OTHER; note = 2'-O-methyl modified nucleotide
  modified_base 70: mod_base = OTHER; note = 2'-O-methyl modified nucleotide
  modified_base 71: mod_base = OTHER; note = 2'-O-methyl modified nucleotide
  modified_base 72: mod_base = OTHER; note = 2'-O-methyl modified nucleotide
  modified_base 73: mod_base = OTHER; note = 2'-O-methyl modified nucleotide
  modified_base 74: mod_base = OTHER; note = 2'-O-methyl modified nucleotide
  modified_base 75: mod_base = OTHER; note = 2'-O-methyl modified nucleotide
  modified_base 76: mod_base = OTHER; note = 2'-O-methyl modified nucleotide
  modified_base 77: mod_base = OTHER; note = 2'-O-methyl modified nucleotide
  modified_base 78: mod_base = OTHER; note = 2'-O-methyl modified nucleotide
  modified_base 79: mod_base = OTHER; note = 2'-O-methyl modified nucleotide
  modified_base 80: mod_base = OTHER; note = 2'-O-methyl modified nucleotide
  modified_base 81: mod_base = OTHER; note = 2'-O-methyl modified nucleotide
  modified_base 82: mod_base = OTHER; note = 2'-O-methyl modified nucleotide
  modified_base 83: mod_base = OTHER; note = 2'-O-methyl modified nucleotide
  modified_base 84: mod_base = OTHER; note = 2'-O-methyl modified nucleotide
  modified_base 85: mod_base = OTHER; note = 2'-O-methyl modified nucleotide
  modified_base 86: mod_base = OTHER; note = 2'-O-methyl modified nucleotide
  modified_base 87: mod_base = OTHER; note = 2'-O-methyl modified nucleotide
  modified_base 88: mod_base = OTHER; note = 2'-O-methyl modified nucleotide
  modified_base 89: mod_base = OTHER; note = 2'-O-methyl modified nucleotide
  modified_base 90: mod_base = OTHER; note = 2'-O-methyl modified nucleotide
  modified_base 91: mod_base = OTHER; note = 2'-O-methyl modified nucleotide
  modified_base 92: mod_base = OTHER; note = 2'-O-methyl modified nucleotide
  modified_base 93: mod_base = OTHER; note = 2'-O-methyl modified nucleotide
  modified_base 94: mod_base = OTHER; note = 2'-O-methyl modified nucleotide
  modified_base 95: mod_base = OTHER; note = 2'-O-methyl modified nucleotide
  modified_base 96: mod_base = OTHER; note = 2'-O-methyl modified nucleotide
  modified_base 97: mod_base = OTHER; note = 2'-O-methyl modified nucleotide with phosphorothioate linkage
  modified_base 98: mod_base = OTHER; note = 2'-O-methyl modified nucleotide with phosphorothioate linkage
  modified_base 99: mod_base = OTHER; note = 2'-O-methyl modified nucleotide with phosphorothioate linkage
  modified_base 100: mod_base = OTHER; note = 2'-O-methyl modified nucleotide

SEQ ID NO: 157 - RNA, 100 nt, synthetic construct; identical to SEQ ID NO: 135
  source 1..100: mol_type = other RNA; note = Description of Artificial Sequence: Synthetic polynucleotide
  modified_base 1: mod_base = OTHER; note = 2'-O-methyl modified nucleotide with phosphorothioate linkage
  modified_base 2: mod_base = OTHER; note = 2'-O-methyl modified nucleotide with phosphorothioate linkage
  modified_base 3: mod_base = OTHER; note = 2'-O-methyl modified nucleotide with phosphorothioate linkage
  modified_base 29: mod_base = OTHER; note = 2'-O-methyl modified nucleotide
  modified_base 30: mod_base = OTHER; note = 2'-O-methyl modified nucleotide
  modified_base 31: mod_base = OTHER; note = 2'-O-methyl modified nucleotide
  modified_base 32: mod_base = OTHER; note = 2'-O-methyl modified nucleotide
  modified_base 33: mod_base = OTHER; note = 2'-O-methyl modified nucleotide
  modified_base 34: mod_base = OTHER; note = 2'-O-methyl modified nucleotide
  modified_base 35: mod_base = OTHER; note = 2'-O-methyl modified nucleotide
  modified_base 36: mod_base = OTHER; note = 2'-O-methyl modified nucleotide
  modified_base 37: mod_base = OTHER; note = 2'-O-methyl modified nucleotide
  modified_base 38: mod_base = OTHER; note = 2'-O-methyl modified nucleotide
  modified_base 39: mod_base = OTHER; note = 2'-O-methyl modified nucleotide
  modified_base 40: mod_base = OTHER; note = 2'-O-methyl modified nucleotide
  modified_base 69: mod_base = OTHER; note = 2'-O-methyl modified nucleotide
  modified_base 70: mod_base = OTHER; note = 2'-O-methyl modified nucleotide
  modified_base 71: mod_base = OTHER; note = 2'-O-methyl modified nucleotide
  modified_base 72: mod_base = OTHER; note = 2'-O-methyl modified nucleotide
  modified_base 73: mod_base = OTHER; note = 2'-O-methyl modified nucleotide
  modified_base 74: mod_base = OTHER; note = 2'-O-methyl modified nucleotide
  modified_base 75: mod_base = OTHER; note = 2'-O-methyl modified nucleotide
  modified_base 76: mod_base = OTHER; note = 2'-O-methyl modified nucleotide
  modified_base 77: mod_base = OTHER; note = 2'-O-methyl modified nucleotide
  modified_base 78: mod_base = OTHER; note = 2'-O-methyl modified nucleotide
  modified_base 79: mod_base = OTHER; note = 2'-O-methyl modified nucleotide
  modified_base 80: mod_base = OTHER; note = 2'-O-methyl modified nucleotide
  modified_base 81: mod_base = OTHER; note = 2'-O-methyl modified nucleotide
  modified_base 82: mod_base = OTHER; note = 2'-O-methyl modified nucleotide
  modified_base 83: mod_base = OTHER; note = 2'-O-methyl modified nucleotide
  modified_base 84: mod_base = OTHER; note = 2'-O-methyl modified nucleotide
  modified_base 85: mod_base = OTHER; note = 2'-O-methyl modified nucleotide
  modified_base 86: mod_base = OTHER; note = 2'-O-methyl modified nucleotide
  modified_base 87: mod_base = OTHER; note = 2'-O-methyl modified nucleotide
  modified_base 88: mod_base = OTHER; note = 2'-O-methyl modified nucleotide
  modified_base 89: mod_base = OTHER; note = 2'-O-methyl modified nucleotide
  modified_base 90: mod_base = OTHER; note = 2'-O-methyl modified nucleotide
  modified_base 91: mod_base = OTHER; note = 2'-O-methyl modified nucleotide
  modified_base 92: mod_base = OTHER; note = 2'-O-methyl modified nucleotide
  modified_base 93: mod_base = OTHER; note = 2'-O-methyl modified nucleotide
  modified_base 94: mod_base = OTHER; note = 2'-O-methyl modified nucleotide
  modified_base 95: mod_base = OTHER; note = 2'-O-methyl modified nucleotide
  modified_base 96: mod_base = OTHER; note = 2'-O-methyl modified nucleotide
  modified_base 97: mod_base = OTHER; note = 2'-O-methyl modified nucleotide with phosphorothioate linkage
  modified_base 98: mod_base = OTHER; note = 2'-O-methyl modified nucleotide with phosphorothioate linkage
  modified_base 99: mod_base = OTHER; note = 2'-O-methyl modified nucleotide with phosphorothioate linkage
  modified_base 100: mod_base = OTHER; note = 2'-O-methyl modified nucleotide

SEQ ID NO: 158 - RNA, 100 nt, synthetic construct; identical to SEQ ID NO: 136
  source 1..100: mol_type = other RNA; note = Description of Artificial Sequence: Synthetic polynucleotide
  modified_base 1: mod_base = OTHER; note = 2'-O-methyl modified nucleotide with phosphorothioate linkage
  modified_base 2: mod_base = OTHER; note = 2'-O-methyl modified nucleotide with phosphorothioate linkage
  modified_base 3: mod_base = OTHER; note = 2'-O-methyl modified nucleotide with phosphorothioate linkage
  modified_base 29: mod_base = OTHER; note = 2'-O-methyl modified nucleotide
  modified_base 30: mod_base = OTHER; note = 2'-O-methyl modified nucleotide
  modified_base 31: mod_base = OTHER; note = 2'-O-methyl modified nucleotide
  modified_base 32: mod_base = OTHER; note = 2'-O-methyl modified nucleotide
  modified_base 33: mod_base = OTHER; note = 2'-O-methyl modified nucleotide
  modified_base 34: mod_base = OTHER; note = 2'-O-methyl modified nucleotide
  modified_base 35: mod_base = OTHER; note = 2'-O-methyl modified nucleotide
  modified_base 36: mod_base = OTHER; note = 2'-O-methyl modified nucleotide
  modified_base 37: mod_base = OTHER; note = 2'-O-methyl modified nucleotide
  modified_base 38: mod_base = OTHER; note = 2'-O-methyl modified nucleotide
  modified_base 39: mod_base = OTHER; note = 2'-O-methyl modified nucleotide
  modified_base 40: mod_base = OTHER; note = 2'-O-methyl modified nucleotide
  modified_base 69: mod_base = OTHER; note = 2'-O-methyl modified nucleotide
  modified_base 70: mod_base = OTHER; note = 2'-O-methyl modified nucleotide
  modified_base 71: mod_base = OTHER; note = 2'-O-methyl modified nucleotide
  modified_base 72: mod_base = OTHER; note = 2'-O-methyl modified nucleotide
  modified_base 73: mod_base = OTHER; note = 2'-O-methyl modified nucleotide
  modified_base 74: mod_base = OTHER; note = 2'-O-methyl modified nucleotide
  modified_base 75: mod_base = OTHER; note = 2'-O-methyl modified nucleotide
  modified_base 76: mod_base = OTHER; note = 2'-O-methyl modified nucleotide
  modified_base 77: mod_base = OTHER; note = 2'-O-methyl modified nucleotide
  modified_base 78: mod_base = OTHER; note = 2'-O-methyl modified nucleotide
  modified_base 79: mod_base = OTHER; note = 2'-O-methyl modified nucleotide
  modified_base 80: mod_base = OTHER; note = 2'-O-methyl modified nucleotide
  modified_base 81: mod_base = OTHER; note = 2'-O-methyl modified nucleotide
  modified_base 82: mod_base = OTHER; note = 2'-O-methyl modified nucleotide
  modified_base 83: mod_base = OTHER; note = 2'-O-methyl modified nucleotide
  modified_base 84: mod_base = OTHER; note = 2'-O-methyl modified nucleotide
  modified_base 85: mod_base = OTHER; note = 2'-O-methyl modified nucleotide
  modified_base 86: mod_base = OTHER; note = 2'-O-methyl modified nucleotide
  modified_base 87: mod_base = OTHER; note = 2'-O-methyl modified nucleotide
  modified_base 88: mod_base = OTHER; note = 2'-O-methyl modified nucleotide
  modified_base 89: mod_base = OTHER; note = 2'-O-methyl modified nucleotide
  modified_base 90: mod_base = OTHER; note = 2'-O-methyl modified nucleotide
  modified_base 91: mod_base = OTHER; note = 2'-O-methyl modified nucleotide
  modified_base 92: mod_base = OTHER; note = 2'-O-methyl modified nucleotide
  modified_base 93: mod_base = OTHER; note = 2'-O-methyl modified nucleotide
  modified_base 94: mod_base = OTHER; note = 2'-O-methyl modified nucleotide
  modified_base 95: mod_base = OTHER; note = 2'-O-methyl modified nucleotide
  modified_base 96: mod_base = OTHER; note = 2'-O-methyl modified nucleotide
  modified_base 97: mod_base = OTHER; note = 2'-O-methyl modified nucleotide with phosphorothioate linkage
  modified_base 98: mod_base = OTHER; note = 2'-O-methyl modified nucleotide with phosphorothioate linkage
  modified_base 99: mod_base = OTHER; note = 2'-O-methyl modified nucleotide with phosphorothioate linkage
  modified_base 100: mod_base = OTHER; note = 2'-O-methyl modified nucleotide

SEQ ID NO: 159 - RNA, 100 nt, synthetic construct; identical to SEQ ID NO: 137
  source 1..100: mol_type = other RNA; note = Description of Artificial Sequence: Synthetic polynucleotide
  modified_base 1: mod_base = OTHER; note = 2'-O-methyl modified nucleotide with phosphorothioate linkage
  modified_base 2: mod_base = OTHER; note = 2'-O-methyl modified nucleotide with phosphorothioate linkage
  modified_base 3: mod_base = OTHER; note = 2'-O-methyl modified nucleotide with phosphorothioate linkage
  modified_base 29: mod_base = OTHER; note = 2'-O-methyl modified nucleotide
  modified_base 30: mod_base = OTHER; note = 2'-O-methyl modified nucleotide
  modified_base 31: mod_base = OTHER; note = 2'-O-methyl modified nucleotide
  modified_base 32: mod_base = OTHER; note = 2'-O-methyl modified nucleotide
  modified_base 33: mod_base = OTHER; note = 2'-O-methyl modified nucleotide
  modified_base 34: mod_base = OTHER; note = 2'-O-methyl modified nucleotide
  modified_base 35: mod_base = OTHER; note = 2'-O-methyl modified nucleotide
  modified_base 36: mod_base = OTHER; note = 2'-O-methyl modified nucleotide
  modified_base 37: mod_base = OTHER; note = 2'-O-methyl modified nucleotide
  modified_base 38: mod_base = OTHER; note = 2'-O-methyl modified nucleotide
  modified_base 39: mod_base = OTHER; note = 2'-O-methyl modified nucleotide
  modified_base 40: mod_base = OTHER; note = 2'-O-methyl modified nucleotide
  modified_base 69: mod_base = OTHER; note = 2'-O-methyl modified nucleotide
  modified_base 70: mod_base = OTHER; note = 2'-O-methyl modified nucleotide
  modified_base 71: mod_base = OTHER; note = 2'-O-methyl modified nucleotide
  modified_base 72: mod_base = OTHER; note = 2'-O-methyl modified nucleotide
  modified_base 73: mod_base = OTHER; note = 2'-O-methyl modified nucleotide
  modified_base 74: mod_base = OTHER; note = 2'-O-methyl modified nucleotide
  modified_base 75: mod_base = OTHER; note = 2'-O-methyl modified nucleotide
  modified_base 76: mod_base = OTHER; note = 2'-O-methyl modified nucleotide
  modified_base 77: mod_base = OTHER; note = 2'-O-methyl modified nucleotide
  modified_base 78: mod_base = OTHER; note = 2'-O-methyl modified nucleotide
  modified_base 79: mod_base = OTHER; note = 2'-O-methyl modified nucleotide
  modified_base 80: mod_base = OTHER; note = 2'-O-methyl modified nucleotide
  modified_base 81: mod_base = OTHER; note = 2'-O-methyl modified nucleotide
  modified_base 82: mod_base = OTHER; note = 2'-O-methyl modified nucleotide
  modified_base 83: mod_base = OTHER; note = 2'-O-methyl modified nucleotide
  modified_base 84: mod_base = OTHER; note = 2'-O-methyl modified nucleotide
  modified_base 85: mod_base = OTHER; note = 2'-O-methyl modified nucleotide
  modified_base 86: mod_base = OTHER; note = 2'-O-methyl modified nucleotide
  modified_base 87: mod_base = OTHER; note = 2'-O-methyl modified nucleotide
  modified_base 88: mod_base = OTHER; note = 2'-O-methyl modified nucleotide
  modified_base 89: mod_base = OTHER; note = 2'-O-methyl modified nucleotide
  modified_base 90: mod_base = OTHER; note = 2'-O-methyl modified nucleotide
  modified_base 91: mod_base = OTHER; note = 2'-O-methyl modified nucleotide
  modified_base 92: mod_base = OTHER; note = 2'-O-methyl modified nucleotide
  modified_base 93: mod_base = OTHER; note = 2'-O-methyl modified nucleotide
  modified_base 94: mod_base = OTHER; note = 2'-O-methyl modified nucleotide
  modified_base 95: mod_base = OTHER; note = 2'-O-methyl modified nucleotide
  modified_base 96: mod_base = OTHER; note = 2'-O-methyl modified nucleotide
  modified_base 97: mod_base = OTHER; note = 2'-O-methyl modified nucleotide with phosphorothioate linkage
  modified_base 98: mod_base = OTHER; note = 2'-O-methyl modified nucleotide with phosphorothioate linkage
  modified_base 99: mod_base = OTHER; note = 2'-O-methyl modified nucleotide with phosphorothioate linkage
  modified_base 100: mod_base = OTHER; note = 2'-O-methyl modified nucleotide

SEQ ID NO: 160 - RNA, 100 nt, synthetic construct; identical to SEQ ID NO: 138
  source 1..100: mol_type = other RNA; note = Description of Artificial Sequence: Synthetic polynucleotide
  modified_base 1: mod_base = OTHER; note = 2'-O-methyl modified nucleotide with phosphorothioate linkage
  modified_base 2: mod_base = OTHER; note = 2'-O-methyl modified nucleotide with phosphorothioate linkage
  modified_base 3: mod_base = OTHER; note = 2'-O-methyl modified nucleotide with phosphorothioate linkage
  modified_base 29: mod_base = OTHER; note = 2'-O-methyl modified nucleotide
  modified_base 30: mod_base = OTHER; note = 2'-O-methyl modified nucleotide
  modified_base 31: mod_base = OTHER; note = 2'-O-methyl modified nucleotide
  modified_base 32: mod_base = OTHER; note = 2'-O-methyl modified nucleotide
  modified_base 33: mod_base = OTHER; note = 2'-O-methyl modified nucleotide
  modified_base 34: mod_base = OTHER; note = 2'-O-methyl modified nucleotide
  modified_base 35: mod_base = OTHER; note = 2'-O-methyl modified nucleotide
  modified_base 36: mod_base = OTHER; note = 2'-O-methyl modified nucleotide
  modified_base 37: mod_base = OTHER; note = 2'-O-methyl modified nucleotide
  modified_base 38: mod_base = OTHER; note = 2'-O-methyl modified nucleotide
  modified_base 39: mod_base = OTHER; note = 2'-O-methyl modified nucleotide
  modified_base 40: mod_base = OTHER; note = 2'-O-methyl modified nucleotide
  modified_base 69: mod_base = OTHER; note = 2'-O-methyl modified nucleotide
  modified_base 70: mod_base = OTHER; note = 2'-O-methyl modified nucleotide
  modified_base 71: mod_base = OTHER; note = 2'-O-methyl modified nucleotide
  modified_base 72: mod_base = OTHER; note = 2'-O-methyl modified nucleotide
  modified_base 73: mod_base = OTHER; note = 2'-O-methyl modified nucleotide
  modified_base 74: mod_base = OTHER; note = 2'-O-methyl modified nucleotide
  modified_base 75: mod_base = OTHER; note = 2'-O-methyl modified nucleotide
  modified_base 76: mod_base = OTHER; note = 2'-O-methyl modified nucleotide
  modified_base 77: mod_base = OTHER; note = 2'-O-methyl modified nucleotide
  modified_base 78: mod_base = OTHER; note = 2'-O-methyl modified nucleotide
  modified_base 79: mod_base = OTHER; note = 2'-O-methyl modified nucleotide
  modified_base 80: mod_base = OTHER; note = 2'-O-methyl modified nucleotide
  modified_base 81: mod_base = OTHER; note = 2'-O-methyl modified nucleotide
  modified_base 82: mod_base = OTHER; note = 2'-O-methyl modified nucleotide
  modified_base 83: mod_base = OTHER; note = 2'-O-methyl modified nucleotide
  modified_base 84: mod_base = OTHER; note = 2'-O-methyl modified nucleotide
  modified_base 85: mod_base = OTHER; note = 2'-O-methyl modified nucleotide
  modified_base 86: mod_base = OTHER; note = 2'-O-methyl modified nucleotide
  modified_base 87: mod_base = OTHER; note = 2'-O-methyl modified nucleotide
  modified_base 88: mod_base = OTHER; note = 2'-O-methyl modified nucleotide
  modified_base 89: mod_base = OTHER; note = 2'-O-methyl modified nucleotide
  modified_base 90: mod_base = OTHER; note = 2'-O-methyl modified nucleotide
  modified_base 91: mod_base = OTHER; note = 2'-O-methyl modified nucleotide
  modified_base 92: mod_base = OTHER; note = 2'-O-methyl modified nucleotide
  modified_base 93: mod_base = OTHER; note = 2'-O-methyl modified nucleotide
  modified_base 94: mod_base = OTHER; note = 2'-O-methyl modified nucleotide
  modified_base 95: mod_base = OTHER; note = 2'-O-methyl modified nucleotide
  modified_base 96: mod_base = OTHER; note = 2'-O-methyl modified nucleotide
  modified_base 97: mod_base = OTHER; note = 2'-O-methyl modified nucleotide with phosphorothioate linkage
  modified_base 98: mod_base = OTHER; note = 2'-O-methyl modified nucleotide with phosphorothioate linkage
  modified_base 99: mod_base = OTHER; note = 2'-O-methyl modified nucleotide with phosphorothioate linkage
  modified_base 100: mod_base = OTHER; note = 2'-O-methyl modified nucleotide

SEQ ID NO: 161 - RNA, 100 nt, synthetic construct; identical to SEQ ID NO: 139
  source 1..100: mol_type = other RNA; note = Description of Artificial Sequence: Synthetic polynucleotide
  modified_base 1: mod_base = OTHER; note = 2'-O-methyl modified nucleotide with phosphorothioate linkage
  modified_base 2: mod_base = OTHER; note = 2'-O-methyl modified nucleotide with phosphorothioate linkage
  modified_base 3: mod_base = OTHER; note = 2'-O-methyl modified nucleotide with phosphorothioate linkage
  modified_base 29: mod_base = OTHER; note = 2'-O-methyl modified nucleotide
  modified_base 30: mod_base = OTHER; note = 2'-O-methyl modified nucleotide
  modified_base 31: mod_base = OTHER; note = 2'-O-methyl modified nucleotide
  modified_base 32: mod_base = OTHER; note = 2'-O-methyl modified nucleotide
  modified_base 33: mod_base = OTHER; note = 2'-O-methyl modified nucleotide
  modified_base 34: mod_base = OTHER; note = 2'-O-methyl modified nucleotide
  modified_base 35: mod_base = OTHER; note = 2'-O-methyl modified nucleotide
  modified_base 36: mod_base = OTHER; note = 2'-O-methyl modified nucleotide
  modified_base 37: mod_base = OTHER; note = 2'-O-methyl modified nucleotide
  modified_base 38: mod_base = OTHER; note = 2'-O-methyl modified nucleotide
  modified_base 39: mod_base = OTHER; note = 2'-O-methyl modified nucleotide
  modified_base 40: mod_base = OTHER; note = 2'-O-methyl modified nucleotide
  modified_base 69: mod_base = OTHER; note = 2'-O-methyl modified nucleotide
  modified_base 70: mod_base = OTHER; note = 2'-O-methyl modified nucleotide
  modified_base 71: mod_base = OTHER; note = 2'-O-methyl modified nucleotide
  modified_base 72: mod_base = OTHER; note = 2'-O-methyl modified nucleotide
  modified_base 73: mod_base = OTHER; note = 2'-O-methyl modified nucleotide
  modified_base 74: mod_base = OTHER; note = 2'-O-methyl modified nucleotide
  modified_base 75: mod_base = OTHER; note = 2'-O-methyl modified nucleotide
  modified_base 76: mod_base = OTHER; note = 2'-O-methyl modified nucleotide
  modified_base 77: mod_base = OTHER; note = 2'-O-methyl modified nucleotide
  modified_base 78: mod_base = OTHER; note = 2'-O-methyl modified nucleotide
  modified_base 79: mod_base = OTHER; note = 2'-O-methyl modified nucleotide
  modified_base 80: mod_base = OTHER; note = 2'-O-methyl modified nucleotide
  modified_base 81: mod_base = OTHER; note = 2'-O-methyl modified nucleotide
  modified_base 82: mod_base = OTHER; note = 2'-O-methyl modified nucleotide
  modified_base 83: mod_base = OTHER; note = 2'-O-methyl modified nucleotide
  modified_base 84: mod_base = OTHER; note = 2'-O-methyl modified nucleotide
  modified_base 85: mod_base = OTHER; note = 2'-O-methyl modified nucleotide
  modified_base 86: mod_base = OTHER; note = 2'-O-methyl modified nucleotide
  modified_base 87: mod_base = OTHER; note = 2'-O-methyl modified nucleotide
  modified_base 88: mod_base = OTHER; note = 2'-O-methyl modified nucleotide
  modified_base 89: mod_base = OTHER; note = 2'-O-methyl modified nucleotide
  modified_base 90: mod_base = OTHER; note = 2'-O-methyl modified nucleotide
  modified_base 91: mod_base = OTHER; note = 2'-O-methyl modified nucleotide
  modified_base 92: mod_base = OTHER; note = 2'-O-methyl modified nucleotide
  modified_base 93: mod_base = OTHER; note = 2'-O-methyl modified nucleotide
  modified_base 94: mod_base = OTHER; note = 2'-O-methyl modified nucleotide
  modified_base 95: mod_base = OTHER; note = 2'-O-methyl modified nucleotide
  modified_base 96: mod_base = OTHER; note = 2'-O-methyl modified nucleotide
  modified_base 97: mod_base = OTHER; note = 2'-O-methyl modified nucleotide with phosphorothioate linkage
  modified_base 98: mod_base = OTHER; note = 2'-O-methyl modified nucleotide with phosphorothioate linkage
  modified_base 99: mod_base = OTHER; note = 2'-O-methyl modified nucleotide with phosphorothioate linkage
  modified_base 100: mod_base = OTHER; note = 2'-O-methyl modified nucleotide

SEQ ID NO: 162 - RNA, 100 nt, synthetic construct; identical to SEQ ID NO: 140
  source 1..100: mol_type = other RNA; note = Description of Artificial Sequence: Synthetic polynucleotide
  modified_base 1: mod_base = OTHER; note = 2'-O-methyl modified nucleotide with phosphorothioate linkage
  modified_base 2: mod_base = OTHER; note = 2'-O-methyl modified nucleotide with phosphorothioate linkage
  modified_base 3: mod_base = OTHER; note = 2'-O-methyl modified nucleotide with phosphorothioate linkage
  modified_base 29: mod_base = OTHER; note = 2'-O-methyl modified nucleotide
  modified_base 30: mod_base = OTHER; note = 2'-O-methyl modified nucleotide
  modified_base 31: mod_base = OTHER; note = 2'-O-methyl modified nucleotide
  modified_base 32: mod_base = OTHER; note = 2'-O-methyl modified nucleotide
  modified_base 33: mod_base = OTHER; note = 2'-O-methyl modified nucleotide
  modified_base 34: mod_base = OTHER; note = 2'-O-methyl modified nucleotide
  modified_base 35: mod_base = OTHER; note = 2'-O-methyl modified nucleotide
  modified_base 36: mod_base = OTHER; note = 2'-O-methyl modified nucleotide
  modified_base 37: mod_base = OTHER; note = 2'-O-methyl modified nucleotide
  modified_base 38: mod_base = OTHER; note = 2'-O-methyl modified nucleotide
  modified_base 39: mod_base = OTHER; note = 2'-O-methyl modified nucleotide
  modified_base 40: mod_base = OTHER; note = 2'-O-methyl modified nucleotide
  modified_base 69: mod_base = OTHER; note = 2'-O-methyl modified nucleotide
  modified_base 70: mod_base = OTHER; note = 2'-O-methyl modified nucleotide
  modified_base 71: mod_base = OTHER; note = 2'-O-methyl modified nucleotide
  modified_base 72: mod_base = OTHER; note = 2'-O-methyl modified nucleotide
  modified_base 73: mod_base = OTHER; note = 2'-O-methyl modified nucleotide
  modified_base 74: mod_base = OTHER; note = 2'-O-methyl modified nucleotide
  modified_base 75: mod_base = OTHER; note = 2'-O-methyl modified nucleotide
  modified_base 76: mod_base = OTHER; note = 2'-O-methyl modified nucleotide
  modified_base 77: mod_base = OTHER; note = 2'-O-methyl modified nucleotide
  modified_base 78: mod_base = OTHER; note = 2'-O-methyl modified nucleotide
  modified_base 79: mod_base = OTHER; note = 2'-O-methyl modified nucleotide
  modified_base 80: mod_base = OTHER; note = 2'-O-methyl modified nucleotide
  modified_base 81: mod_base = OTHER; note = 2'-O-methyl modified nucleotide
  modified_base 82: mod_base = OTHER; note = 2'-O-methyl modified nucleotide
  modified_base 83: mod_base = OTHER; note = 2'-O-methyl modified nucleotide
  modified_base 84: mod_base = OTHER; note = 2'-O-methyl modified nucleotide
  modified_base 85: mod_base = OTHER; note = 2'-O-methyl modified nucleotide
  modified_base 86: mod_base = OTHER; note = 2'-O-methyl modified nucleotide
  modified_base 87: mod_base = OTHER; note = 2'-O-methyl modified nucleotide
  modified_base 88: mod_base = OTHER; note = 2'-O-methyl modified nucleotide
  modified_base 89: mod_base = OTHER; note = 2'-O-methyl modified nucleotide
  modified_base 90: mod_base = OTHER; note = 2'-O-methyl modified nucleotide
  modified_base 91: mod_base = OTHER; note = 2'-O-methyl modified nucleotide
  modified_base 92: mod_base = OTHER; note = 2'-O-methyl modified nucleotide
  modified_base 93: mod_base = OTHER; note = 2'-O-methyl modified nucleotide
  modified_base 94: mod_base = OTHER; note = 2'-O-methyl modified nucleotide
  modified_base 95: mod_base = OTHER; note = 2'-O-methyl modified nucleotide
  modified_base 96: mod_base = OTHER; note = 2'-O-methyl modified nucleotide
  modified_base 97: mod_base = OTHER; note = 2'-O-methyl modified nucleotide with phosphorothioate linkage
  modified_base 98: mod_base = OTHER; note = 2'-O-methyl modified nucleotide with phosphorothioate linkage
  modified_base 99: mod_base = OTHER; note = 2'-O-methyl modified nucleotide with phosphorothioate linkage
  modified_base 100: mod_base = OTHER; note = 2'-O-methyl modified nucleotide

SEQ ID NO: 163 - RNA, 100 nt, synthetic construct; identical to SEQ ID NO: 141
  source 1..100: mol_type = other RNA; note = Description of Artificial Sequence: Synthetic polynucleotide
  modified_base 1: mod_base = OTHER; note = 2'-O-methyl modified nucleotide with phosphorothioate linkage
  modified_base 2: mod_base = OTHER; note = 2'-O-methyl modified nucleotide with phosphorothioate linkage
  modified_base 3: mod_base = OTHER; note = 2'-O-methyl modified nucleotide with phosphorothioate linkage
  modified_base 29: mod_base = OTHER; note = 2'-O-methyl modified nucleotide
  modified_base 30: mod_base = OTHER; note = 2'-O-methyl modified nucleotide
  modified_base 31: mod_base = OTHER; note = 2'-O-methyl modified nucleotide
  modified_base 32: mod_base = OTHER; note = 2'-O-methyl modified nucleotide
  modified_base 33: mod_base = OTHER; note = 2'-O-methyl modified nucleotide
  modified_base 34: mod_base = OTHER; note = 2'-O-methyl modified nucleotide
  modified_base 35: mod_base = OTHER; note = 2'-O-methyl modified nucleotide
  modified_base 36: mod_base = OTHER; note = 2'-O-methyl modified nucleotide
  modified_base 37: mod_base = OTHER; note = 2'-O-methyl modified nucleotide
  modified_base 38: mod_base = OTHER; note = 2'-O-methyl modified nucleotide
  modified_base 39: mod_base = OTHER; note = 2'-O-methyl modified nucleotide
  modified_base 40: mod_base = OTHER; note = 2'-O-methyl modified nucleotide
  modified_base 69: mod_base = OTHER; note = 2'-O-methyl modified nucleotide
  modified_base 70: mod_base = OTHER; note = 2'-O-methyl modified nucleotide
  modified_base 71: mod_base = OTHER; note = 2'-O-methyl modified nucleotide
  modified_base 72: mod_base = OTHER; note = 2'-O-methyl modified nucleotide
  modified_base 73: mod_base = OTHER; note = 2'-O-methyl modified nucleotide
  modified_base 74: mod_base = OTHER; note = 2'-O-methyl modified nucleotide
  modified_base 75: mod_base = OTHER; note = 2'-O-methyl modified nucleotide
  modified_base 76: mod_base = OTHER; note = 2'-O-methyl modified nucleotide
  modified_base 77: mod_base = OTHER; note = 2'-O-methyl modified nucleotide
  modified_base 78: mod_base = OTHER; note = 2'-O-methyl modified nucleotide
  modified_base 79: mod_base = OTHER; note = 2'-O-methyl modified nucleotide
  modified_base 80: mod_base = OTHER; note = 2'-O-methyl modified nucleotide
  modified_base 81: mod_base = OTHER; note = 2'-O-methyl modified nucleotide
  modified_base 82: mod_base = OTHER; note = 2'-O-methyl modified nucleotide
  modified_base 83: mod_base = OTHER; note = 2'-O-methyl modified nucleotide
  modified_base 84: mod_base = OTHER; note = 2'-O-methyl modified nucleotide
  modified_base 85: mod_base = OTHER; note = 2'-O-methyl modified nucleotide
  modified_base 86: mod_base = OTHER; note = 2'-O-methyl modified nucleotide
  modified_base 87: mod_base = OTHER; note = 2'-O-methyl modified nucleotide
  modified_base 88: mod_base = OTHER; note = 2'-O-methyl modified nucleotide
  modified_base 89: mod_base = OTHER; note = 2'-O-methyl modified nucleotide
  modified_base 90: mod_base = OTHER; note = 2'-O-methyl modified nucleotide
  modified_base 91: mod_base = OTHER; note = 2'-O-methyl modified nucleotide
  modified_base 92: mod_base = OTHER; note = 2'-O-methyl modified nucleotide
  modified_base 93: mod_base = OTHER; note = 2'-O-methyl modified nucleotide
  modified_base 94: mod_base = OTHER; note = 2'-O-methyl modified nucleotide
  modified_base 95: mod_base = OTHER; note = 2'-O-methyl modified nucleotide
  modified_base 96: mod_base = OTHER; note = 2'-O-methyl modified nucleotide
  modified_base 97: mod_base = OTHER; note = 2'-O-methyl modified nucleotide with phosphorothioate linkage
  modified_base 98: mod_base = OTHER; note = 2'-O-methyl modified nucleotide with phosphorothioate linkage
  modified_base 99: mod_base = OTHER; note = 2'-O-methyl modified nucleotide with phosphorothioate linkage
  modified_base 100: mod_base = OTHER; note = 2'-O-methyl modified nucleotide

SEQ ID NO: 164 - RNA, 20 nt, synthetic construct
  source 1..20: mol_type = other RNA; note = Description of Artificial Sequence: Synthetic oligonucleotide
gagcaacctcactcttgtct

SEQ ID NO: 165 - RNA, 20 nt, synthetic construct
  source 1..20: mol_type = other RNA; note = Description of Artificial Sequence: Synthetic oligonucleotide
agcaacctcactcttgtctg

SEQ ID NO: 166 - RNA, 20 nt, synthetic construct
  source 1..20: mol_type = other RNA; note = Description of Artificial Sequence: Synthetic oligonucleotide
acctcactcttgtctgggga

SEQ ID NO: 167 - RNA, 20 nt, synthetic construct
  source 1..20: mol_type = other RNA; note = Description of Artificial Sequence: Synthetic oligonucleotide
cctcactcttgtctggggaa

SEQ ID NO: 168 - RNA, 20 nt, synthetic construct
  source 1..20: mol_type = other RNA; note = Description of Artificial Sequence: Synthetic oligonucleotide
ctcactcttgtctggggaag

SEQ ID NO: 169 - RNA, 20 nt, synthetic construct
  source 1..20: mol_type = other RNA; note = Description of Artificial Sequence: Synthetic oligonucleotide
ggggaaggggagaaaaaaaa

SEQ ID NO: 170 - RNA, 20 nt, synthetic construct
  source 1..20: mol_type = other RNA; note = Description of Artificial Sequence: Synthetic oligonucleotide
gggaaggggagaaaaaaaaa

SEQ ID NO: 171 - RNA, 20 nt, synthetic construct
  source 1..20: mol_type = other RNA; note = Description of Artificial Sequence: Synthetic oligonucleotide
atgcatttgtttcaaaatat

SEQ ID NO: 172 - RNA, 20 nt, synthetic construct
  source 1..20: mol_type = other RNA; note = Description of Artificial Sequence: Synthetic oligonucleotide
tgcatttgtttcaaaatatt

SEQ ID NO: 173 - RNA, 20 nt, synthetic construct
  source 1..20: mol_type = other RNA; note = Description of Artificial Sequence: Synthetic oligonucleotide
tgattcctacagaaaaagtc

SEQ ID NO: 174 - RNA, 20 nt, synthetic construct
  source 1..20: mol_type = other RNA; note = Description of Artificial Sequence: Synthetic oligonucleotide
tacagaaaaagtcaggataa

SEQ ID NO: 175 - RNA, 20 nt, synthetic construct
  source 1..20: mol_type = other RNA; note = Description of Artificial Sequence: Synthetic oligonucleotide
tttcttctgcctttaaacag

SEQ ID NO: 176 - RNA, 20 nt, synthetic construct
  source 1..20: mol_type = other RNA; note = Description of Artificial Sequence: Synthetic oligonucleotide
ttatagttttatattcaaac

SEQ ID NO: 177 - RNA, 20 nt, synthetic construct
  source 1..20: mol_type = other RNA; note = Description of Artificial Sequence: Synthetic oligonucleotide
atttatgagatcaacagcac

SEQ ID NO: 178 - RNA, 20 nt, synthetic construct
  source 1..20: mol_type = other RNA; note = Description of Artificial Sequence: Synthetic oligonucleotide
gatcaacagcacaggttttg

SEQ ID NO: 179 - RNA, 20 nt, synthetic construct
  source 1..20: mol_type = other RNA; note = Description of Artificial Sequence: Synthetic oligonucleotide
ttaaataaagcatagtgcaa

SEQ ID NO: 180 - RNA, 20 nt, synthetic construct
  source 1..20: mol_type = other RNA; note = Description of Artificial Sequence: Synthetic oligonucleotide
taaagcatagtgcaatggat

SEQ ID NO: 181 - RNA, 20 nt, synthetic construct
  source 1..20: mol_type = other RNA; note = Description of Artificial Sequence: Synthetic oligonucleotide
tagtgcaatggataggtctt

SEQ ID NO: 182 - RNA, 20 nt, synthetic construct
  source 1..20: mol_type = other RNA; note = Description of Artificial Sequence: Synthetic oligonucleotide
agtgcaatggataggtctta

SEQ ID NO: 183 - RNA, 20 nt, synthetic construct
  source 1..20: mol_type = other RNA; note = Description of Artificial Sequence: Synthetic oligonucleotide
ttactttgcactttccttag

SEQ ID NO: 184 - RNA, 20 nt, synthetic construct
  source 1..20: mol_type = other RNA; note = Description of Artificial Sequence: Synthetic oligonucleotide
tactttgcactttccttagt

SEQ ID NO: 185 - RNA, 20 nt, synthetic construct
  source 1..20: mol_type = other RNA; note = Description of Artificial Sequence: Synthetic oligonucleotide
tctgaccttttattttacct

SEQ ID NO: 186 - RNA, 20 nt, synthetic construct
  source 1..20: mol_type = other RNA; note = Description of Artificial Sequence: Synthetic oligonucleotide
tactaaaactttattttact

SEQ ID NO: 187 - RNA, 20 nt, synthetic construct
  source 1..20: mol_type = other RNA; note = Description of Artificial Sequence: Synthetic oligonucleotide
aaagttgaacaatagaaaaa

SEQ ID NO: 188 - RNA, 20 nt, synthetic construct
  source 1..20: mol_type = other RNA; note = Description of Artificial Sequence: Synthetic oligonucleotide
aatgcataatctaagtcaaa

SEQ ID NO: 189 - RNA, 20 nt, synthetic construct
  source 1..20: mol_type = other RNA; note = Description of Artificial Sequence: Synthetic oligonucleotide
attatcctgactttttctgt

SEQ ID NO: 190 - RNA, 20 nt, synthetic construct
  source 1..20: mol_type = other RNA; note = Description of Artificial Sequence: Synthetic oligonucleotide
tgaattattcctctgtttaa

SEQ ID NO: 191 - RNA, 20 nt, synthetic construct
  source 1..20: mol_type = other RNA; note = Description of Artificial Sequence: Synthetic oligonucleotide
taattttcttttgcccacta

SEQ ID NO: 192 - RNA, 20 nt, synthetic construct
  source 1..20: mol_type = other RNA; note = Description of Artificial Sequence: Synthetic oligonucleotide
aaaaggtcagaattgtttag

SEQ ID NO: 193 - RNA, 20 nt, synthetic construct
  source 1..20: mol_type = other RNA; note = Description of Artificial Sequence: Synthetic oligonucleotide
aacatcctaggtaaaataaa

SEQ ID NO: 194 - RNA, 20 nt, synthetic construct
  source 1..20: mol_type = other RNA; note = Description of Artificial Sequence: Synthetic oligonucleotide
taataaaattcaaacatcct

SEQ ID NO: 195 - RNA, 20 nt, synthetic construct
  source 1..20: mol_type = other RNA; note = Description of Artificial Sequence: Synthetic oligonucleotide
ttgtcatgtatttctaaaat

SEQ ID NO: 196 - RNA, 20 nt, synthetic construct
  source 1..20: mol_type = other RNA; note = Description of Artificial Sequence: Synthetic oligonucleotide
tttgtcatgtatttctaaaa

SEQ ID NO: 197 - RNA, 100 nt, synthetic construct; identical to SEQ ID NO: 34
  source 1..100: mol_type = other RNA; note = Description of Artificial Sequence: Synthetic polynucleotide

SEQ ID NO: 198 - RNA, 100 nt, synthetic construct
  source 1..100: mol_type = other RNA; note = Description of Artificial Sequence: Synthetic polynucleotide
agcaacctcactcttgtctggttttagagctagaaatagcaagttaaaataaggctagtccgttatcaacttgaaaaagtggcaccgagtcggtgctttt

SEQ ID NO: 199 - RNA, 100 nt, synthetic construct
  source 1..100: mol_type = other RNA; note = Description of Artificial Sequence: Synthetic polynucleotide
acctcactcttgtctggggagttttagagctagaaatagcaagttaaaataaggctagtccgttatcaacttgaaaaagtggcaccgagtcggtgctttt

SEQ ID NO: 200 - RNA, 100 nt, synthetic construct
  source 1..100: mol_type = other RNA; note = Description of Artificial Sequence: Synthetic polynucleotide
cctcactcttgtctggggaagttttagagctagaaatagcaagttaaaataaggctagtccgttatcaacttgaaaaagtggcaccgagtcggtgctttt

SEQ ID NO: 201 - RNA, 100 nt, synthetic construct
  source 1..100: mol_type = other RNA; note = Description of Artificial Sequence: Synthetic polynucleotide
ctcactcttgtctggggaaggttttagagctagaaatagcaagttaaaataaggctagtccgttatcaacttgaaaaagtggcaccgagtcggtgctttt

SEQ ID NO: 202 - RNA, 100 nt, synthetic construct
  source 1..100: mol_type = other RNA; note = Description of Artificial Sequence: Synthetic polynucleotide
ggggaaggggagaaaaaaaagttttagagctagaaatagcaagttaaaataaggctagtccgttatcaacttgaaaaagtggcaccgagtcggtgctttt

SEQ ID NO: 203 - RNA, 100 nt, synthetic construct
  source 1..100: mol_type = other RNA; note = Description of Artificial Sequence: Synthetic polynucleotide
gggaaggggagaaaaaaaaagttttagagctagaaatagcaagttaaaataaggctagtccgttatcaacttgaaaaagtggcaccgagtcggtgctttt

SEQ ID NO: 204 - RNA, 100 nt, synthetic construct; identical to SEQ ID NO: 35
  source 1..100: mol_type = other RNA; note = Description of Artificial Sequence: Synthetic polynucleotide

SEQ ID NO: 205 - RNA, 100 nt, synthetic construct; identical to SEQ ID NO: 36
  source 1..100: mol_type = other RNA; note = Description of Artificial Sequence: Synthetic polynucleotide

SEQ ID NO: 206 - RNA, 100 nt, synthetic construct
  source 1..100: mol_type = other RNA; note = Description of Artificial Sequence: Synthetic polynucleotide
tgattcctacagaaaaagtcgttttagagctagaaatagcaagttaaaataaggctagtccgttatcaacttgaaaaagtggcaccgagtcggtgctttt

SEQ ID NO: 207 - RNA, 100 nt, synthetic construct
  source 1..100: mol_type = other RNA; note = Description of Artificial Sequence: Synthetic polynucleotide
tacagaaaaagtcaggataagttttagagctagaaatagcaagttaaaataaggctagtccgttatcaacttgaaaaagtggcaccgagtcggtgctttt

SEQ ID NO: 208 - RNA, 100 nt, synthetic construct
  source 1..100: mol_type = other RNA; note = Description of Artificial Sequence: Synthetic polynucleotide
tttcttctgcctttaaacaggttttagagctagaaatagcaagttaaaataaggctagtccgttatcaacttgaaaaagtggcaccgagtcggtgctttt

SEQ ID NO: 209 - RNA, 100 nt, synthetic construct
  source 1..100: mol_type = other RNA; note = Description of Artificial Sequence: Synthetic polynucleotide
ttatagttttatattcaaacgttttagagctagaaatagcaagttaaaataaggctagtccgttatcaacttgaaaaagtggcaccgagtcggtgctttt

SEQ ID NO: 210 - RNA, 100 nt, synthetic construct; identical to SEQ ID NO: 37
  source 1..100: mol_type = other RNA; note = Description of Artificial Sequence: Synthetic polynucleotide

SEQ ID NO: 211 - RNA, 100 nt, synthetic construct; identical to SEQ ID NO: 38
  source 1..100: mol_type = other RNA; note = Description of Artificial Sequence: Synthetic polynucleotide

SEQ ID NO: 212 - RNA, 100 nt, synthetic construct; identical to SEQ ID NO: 39
  source 1..100: mol_type = other RNA; note = Description of Artificial Sequence: Synthetic polynucleotide

SEQ ID NO: 213 - RNA, 100 nt, synthetic construct; identical to SEQ ID NO: 40
  source 1..100: mol_type = other RNA; note = Description of Artificial Sequence: Synthetic polynucleotide

SEQ ID NO: 214 - RNA, 100 nt, synthetic construct; identical to SEQ ID NO: 41
  source 1..100: mol_type = other RNA; note = Description of Artificial Sequence: Synthetic polynucleotide

SEQ ID NO: 215 - RNA, 100 nt, synthetic construct
  source 1..100: mol_type = other RNA; note = Description of Artificial Sequence: Synthetic polynucleotide
agtgcaatggataggtcttagttttagagctagaaatagcaagttaaaataaggctagtccgttatcaacttgaaaaagtggcaccgagtcggtgctttt

SEQ ID NO: 216 - RNA, 100 nt, synthetic construct
  source 1..100: mol_type = other RNA; note = Description of Artificial Sequence: Synthetic polynucleotide
ttactttgcactttccttaggttttagagctagaaatagcaagttaaaataaggctagtccgttatcaacttgaaaaagtggcaccgagtcggtgctttt

SEQ ID NO: 217 - RNA, 100 nt, synthetic construct
  source 1..100: mol_type = other RNA; note = Description of Artificial Sequence: Synthetic polynucleotide
tactttgcactttccttagtgttttagagctagaaatagcaagttaaaataaggctagtccgttatcaacttgaaaaagtggcaccgagtcggtgctttt

SEQ ID NO: 218 - RNA, 100 nt, synthetic construct
  source 1..100: mol_type = other RNA; note = Description of Artificial Sequence: Synthetic polynucleotide
tctgaccttttattttacctgttttagagctagaaatagcaagttaaaataaggctagtccgttatcaacttgaaaaagtggcaccgagtcggtgctttt

SEQ ID NO: 219 - RNA, 100 nt, synthetic construct; identical to SEQ ID NO: 42
  source 1..100: mol_type = other RNA; note = Description of Artificial Sequence: Synthetic polynucleotide

SEQ ID NO: 220 - RNA, 100 nt, synthetic construct; identical to SEQ ID NO: 43
  source 1..100: mol_type = other RNA; note = Description of Artificial Sequence: Synthetic polynucleotide

SEQ ID NO: 221 - RNA, 100 nt, synthetic construct; identical to SEQ ID NO: 44
  source 1..100: mol_type = other RNA; note = Description of Artificial Sequence: Synthetic polynucleotide

SEQ ID NO: 222 - RNA, 100 nt, synthetic construct
  source 1..100: mol_type = other RNA; note = Description of Artificial Sequence: Synthetic polynucleotide
attatcctgactttttctgtgttttagagctagaaatagcaagttaaaataaggctagtccgttatcaacttgaaaaagtggcaccgagtcggtgctttt

SEQ ID NO: 223 - RNA, 100 nt, synthetic construct
  source 1..100: mol_type = other RNA; note = Description of Artificial Sequence: Synthetic polynucleotide
tgaattattcctctgtttaagttttagagctagaaatagcaagttaaaataaggctagtccgttatcaacttgaaaaagtggcaccgagtcggtgctttt

SEQ ID NO: 224 - RNA, 100 nt, synthetic construct
  source 1..100: mol_type = other RNA; note = Description of Artificial Sequence: Synthetic polynucleotide
taattttcttttgcccactagttttagagctagaaatagcaagttaaaataaggctagtccgttatcaacttgaaaaagtggcaccgagtcggtgctttt

SEQ ID NO: 225 - RNA, 100 nt, synthetic construct
  source 1..100: mol_type = other RNA; note = Description of Artificial Sequence: Synthetic polynucleotide
aaaaggtcagaattgtttaggttttagagctagaaatagcaagttaaaataaggctagtccgttatcaacttgaaaaagtggcaccgagtcggtgctttt

SEQ ID NO: 226 - RNA, 100 nt, synthetic construct
  source 1..100: mol_type = other RNA; note = Description of Artificial Sequence: Synthetic polynucleotide
aacatcctaggtaaaataaagttttagagctagaaatagcaagttaaaataaggctagtccgttatcaacttgaaaaagtggcaccgagtcggtgctttt

SEQ ID NO: 227 - RNA, 100 nt, synthetic construct; identical to SEQ ID NO: 45
  source 1..100: mol_type = other RNA; note = Description of Artificial Sequence: Synthetic polynucleotide

SEQ ID NO: 228 - RNA, 100 nt, synthetic construct
  source 1..100: mol_type = other RNA; note = Description of Artificial Sequence: Synthetic polynucleotide
ttgtcatgtatttctaaaatgttttagagctagaaatagcaagttaaaataaggctagtccgttatcaacttgaaaaagtggcaccgagtcggtgctttt

SEQ ID NO: 229 - RNA, 100 nt, synthetic construct
  source 1..100: mol_type = other RNA; note = Description of Artificial Sequence: Synthetic polynucleotide
tttgtcatgtatttctaaaagttttagagctagaaatagcaagttaaaataaggctagtccgttatcaacttgaaaaagtggcaccgagtcggtgctttt

SEQ ID NO: 230 - RNA, 100 nt, synthetic construct; identical to SEQ ID NO: 34
  source 1..100: mol_type = other RNA; note = Description of Artificial Sequence: Synthetic polynucleotide
  modified_base 1: mod_base = OTHER; note = 2'-O-methyl modified nucleotide with phosphorothioate linkage
  modified_base 2: mod_base = OTHER; note = 2'-O-methyl modified nucleotide with phosphorothioate linkage
  modified_base 3: mod_base = OTHER; note = 2'-O-methyl modified nucleotide with phosphorothioate linkage
  modified_base 29: mod_base = OTHER; note = 2'-O-methyl modified nucleotide
  modified_base 30: mod_base = OTHER; note = 2'-O-methyl modified nucleotide
  modified_base 31: mod_base = OTHER; note = 2'-O-methyl modified nucleotide
  modified_base 32: mod_base = OTHER; note = 2'-O-methyl modified nucleotide
  modified_base 33: mod_base = OTHER; note = 2'-O-methyl modified nucleotide
  modified_base 34: mod_base = OTHER; note = 2'-O-methyl modified nucleotide
  modified_base 35: mod_base = OTHER; note = 2'-O-methyl modified nucleotide
  modified_base 36: mod_base = OTHER; note = 2'-O-methyl modified nucleotide
  modified_base 37: mod_base = OTHER; note = 2'-O-methyl modified nucleotide
  modified_base 38: mod_base = OTHER; note = 2'-O-methyl modified nucleotide
  modified_base 39: mod_base = OTHER; note = 2'-O-methyl modified nucleotide
  modified_base 40: mod_base = OTHER; note = 2'-O-methyl modified nucleotide
  modified_base 69: mod_base = OTHER; note = 2'-O-methyl modified nucleotide
  modified_base 70: mod_base = OTHER; note = 2'-O-methyl modified nucleotide
  modified_base 71: mod_base = OTHER; note = 2'-O-methyl modified nucleotide
  modified_base 72: mod_base = OTHER; note = 2'-O-methyl modified nucleotide
  modified_base 73: mod_base = OTHER; note = 2'-O-methyl modified nucleotide
  modified_base 74: mod_base = OTHER; note = 2'-O-methyl modified nucleotide
  modified_base 75: mod_base = OTHER; note = 2'-O-methyl modified nucleotide
  modified_base 76: mod_base = OTHER; note = 2'-O-methyl modified nucleotide
  modified_base 77: mod_base = OTHER; note = 2'-O-methyl modified nucleotide
  modified_base 78: mod_base = OTHER; note = 2'-O-methyl modified nucleotide
  modified_base 79: mod_base = OTHER; note = 2'-O-methyl modified nucleotide
  modified_base 80: mod_base = OTHER; note = 2'-O-methyl modified nucleotide
  modified_base 81: mod_base = OTHER; note = 2'-O-methyl modified nucleotide
  modified_base 82: mod_base = OTHER; note = 2'-O-methyl modified nucleotide
  modified_base 83: mod_base = OTHER; note = 2'-O-methyl modified nucleotide
  modified_base 84: mod_base = OTHER; note = 2'-O-methyl modified nucleotide
  modified_base 85: mod_base = OTHER; note = 2'-O-methyl modified nucleotide
  modified_base 86: mod_base = OTHER; note = 2'-O-methyl modified nucleotide
  modified_base 87: mod_base = OTHER; note = 2'-O-methyl modified nucleotide
  modified_base 88: mod_base = OTHER; note = 2'-O-methyl modified nucleotide
  modified_base 89: mod_base = OTHER; note = 2'-O-methyl modified nucleotide
  modified_base 90: mod_base = OTHER; note = 2'-O-methyl modified nucleotide
  modified_base 91: mod_base = OTHER; note = 2'-O-methyl modified nucleotide
  modified_base 92: mod_base = OTHER; note = 2'-O-methyl modified nucleotide
  modified_base 93: mod_base = OTHER; note = 2'-O-methyl modified nucleotide
  modified_base 94: mod_base = OTHER; note = 2'-O-methyl modified nucleotide
  modified_base 95: mod_base = OTHER; note = 2'-O-methyl modified nucleotide
  modified_base 96: mod_base = OTHER; note = 2'-O-methyl modified nucleotide
  modified_base 97: mod_base = OTHER; note = 2'-O-methyl modified nucleotide with phosphorothioate linkage
  modified_base 98: mod_base = OTHER; note = 2'-O-methyl modified nucleotide with phosphorothioate linkage
  modified_base 99: mod_base = OTHER; note = 2'-O-methyl modified nucleotide with phosphorothioate linkage
  modified_base 100: mod_base = OTHER; note = 2'-O-methyl modified nucleotide

SEQ ID NO: 231 - RNA, 100 nt, synthetic construct; identical to SEQ ID NO: 198
  source 1..100: mol_type = other RNA; note = Description of Artificial Sequence: Synthetic polynucleotide
  modified_base 1: mod_base = OTHER; note = 2'-O-methyl modified nucleotide with phosphorothioate linkage
  modified_base 2: mod_base = OTHER; note = 2'-O-methyl modified nucleotide with phosphorothioate linkage
  modified_base 3: mod_base = OTHER; note = 2'-O-methyl modified nucleotide with phosphorothioate linkage
  modified_base 29: mod_base = OTHER; note = 2'-O-methyl modified nucleotide
  modified_base 30: mod_base = OTHER; note = 2'-O-methyl modified nucleotide
  modified_base 31: mod_base = OTHER; note = 2'-O-methyl modified nucleotide
  modified_base 32: mod_base = OTHER; note = 2'-O-methyl modified nucleotide
  modified_base 33: mod_base = OTHER; note = 2'-O-methyl modified nucleotide
  modified_base 34: mod_base = OTHER; note = 2'-O-methyl modified nucleotide
  modified_base 35: mod_base = OTHER; note = 2'-O-methyl modified nucleotide
  modified_base 36: mod_base = OTHER; note = 2'-O-methyl modified nucleotide
  modified_base 37: mod_base = OTHER; note = 2'-O-methyl modified nucleotide
  modified_base 38: mod_base = OTHER; note = 2'-O-methyl modified nucleotide
  modified_base 39: mod_base = OTHER; note = 2'-O-methyl modified nucleotide
  modified_base 40: mod_base = OTHER; note = 2'-O-methyl modified nucleotide
  modified_base 69: mod_base = OTHER; note = 2'-O-methyl modified nucleotide
  modified_base 70: mod_base = OTHER; note = 2'-O-methyl modified nucleotide
  modified_base 71: mod_base = OTHER; note = 2'-O-methyl modified nucleotide
  modified_base 72: mod_base = OTHER; note = 2'-O-methyl modified nucleotide
  modified_base 73: mod_base = OTHER; note = 2'-O-methyl modified nucleotide
  modified_base 74: mod_base = OTHER; note = 2'-O-methyl modified nucleotide
  modified_base 75: mod_base = OTHER; note = 2'-O-methyl modified nucleotide
  modified_base 76: mod_base = OTHER; note = 2'-O-methyl modified nucleotide
  modified_base 77: mod_base = OTHER; note = 2'-O-methyl modified nucleotide
  modified_base 78: mod_base = OTHER; note = 2'-O-methyl modified nucleotide
  modified_base 79: mod_base = OTHER; note = 2'-O-methyl modified nucleotide
  modified_base 80: mod_base = OTHER; note = 2'-O-methyl modified nucleotide
  modified_base 81: mod_base = OTHER; note = 2'-O-methyl modified nucleotide
  modified_base 82: mod_base = OTHER; note = 2'-O-methyl modified nucleotide
  modified_base 83: mod_base = OTHER; note = 2'-O-methyl modified nucleotide
  modified_base 84: mod_base = OTHER; note = 2'-O-methyl modified nucleotide
  modified_base 85: mod_base = OTHER; note = 2'-O-methyl modified nucleotide
  modified_base 86: mod_base = OTHER; note = 2'-O-methyl modified nucleotide
  modified_base 87: mod_base = OTHER; note = 2'-O-methyl modified nucleotide
  modified_base 88: mod_base = OTHER; note = 2'-O-methyl modified nucleotide
  modified_base 89: mod_base = OTHER; note = 2'-O-methyl modified nucleotide
  modified_base 90: mod_base = OTHER; note = 2'-O-methyl modified nucleotide
  modified_base 91: mod_base = OTHER; note = 2'-O-methyl modified nucleotide
  modified_base 92: mod_base = OTHER; note = 2'-O-methyl modified nucleotide
  modified_base 93: mod_base = OTHER; note = 2'-O-methyl modified nucleotide
  modified_base 94: mod_base = OTHER; note = 2'-O-methyl modified nucleotide
  modified_base 95: mod_base = OTHER; note = 2'-O-methyl modified nucleotide
  modified_base 96: mod_base = OTHER; note = 2'-O-methyl modified nucleotide
  modified_base 97: mod_base = OTHER; note = 2'-O-methyl modified nucleotide with phosphorothioate linkage
  modified_base 98: mod_base = OTHER; note = 2'-O-methyl modified nucleotide with phosphorothioate linkage
  modified_base 99: mod_base = OTHER; note = 2'-O-methyl modified nucleotide with phosphorothioate linkage
  modified_base 100: mod_base = OTHER; note = 2'-O-methyl modified nucleotide

SEQ ID NO: 232 - RNA, 100 nt, synthetic construct; identical to SEQ ID NO: 199
  source 1..100: mol_type = other RNA; note = Description of Artificial Sequence: Synthetic polynucleotide
  modified_base 1: mod_base = OTHER; note = 2'-O-methyl modified nucleotide with phosphorothioate linkage
  modified_base 2: mod_base = OTHER; note = 2'-O-methyl modified nucleotide with phosphorothioate linkage
  modified_base 3: mod_base = OTHER; note = 2'-O-methyl modified nucleotide with phosphorothioate linkage
  modified_base 29: mod_base = OTHER; note = 2'-O-methyl modified nucleotide
  modified_base 30: mod_base = OTHER; note = 2'-O-methyl modified nucleotide
  modified_base 31: mod_base = OTHER; note = 2'-O-methyl modified nucleotide
  modified_base 32: mod_base = OTHER; note = 2'-O-methyl modified nucleotide
  modified_base 33: mod_base = OTHER; note = 2'-O-methyl modified nucleotide
  modified_base 34: mod_base = OTHER; note = 2'-O-methyl modified nucleotide
  modified_base 35: mod_base = OTHER; note = 2'-O-methyl modified nucleotide
  modified_base 36: mod_base = OTHER; note = 2'-O-methyl modified nucleotide
  modified_base 37: mod_base = OTHER; note = 2'-O-methyl modified nucleotide
  modified_base 38: mod_base = OTHER; note = 2'-O-methyl modified nucleotide
  modified_base 39: mod_base = OTHER; note = 2'-O-methyl modified nucleotide
  modified_base 40: mod_base = OTHER; note = 2'-O-methyl modified nucleotide
  modified_base 69: mod_base = OTHER; note = 2'-O-methyl modified nucleotide
  modified_base 70: mod_base = OTHER; note = 2'-O-methyl modified nucleotide
  modified_base 71: mod_base = OTHER; note = 2'-O-methyl modified nucleotide
  modified_base 72: mod_base = OTHER; note = 2'-O-methyl modified nucleotide
  modified_base 73: mod_base = OTHER; note = 2'-O-methyl modified nucleotide
  modified_base 74: mod_base = OTHER; note = 2'-O-methyl modified nucleotide
  modified_base 75: mod_base = OTHER; note = 2'-O-methyl modified nucleotide
  modified_base 76: mod_base = OTHER; note = 2'-O-methyl modified nucleotide
  modified_base 77: mod_base = OTHER; note = 2'-O-methyl modified nucleotide
  modified_base 78: mod_base = OTHER; note = 2'-O-methyl modified nucleotide
  modified_base 79: mod_base = OTHER; note = 2'-O-methyl modified nucleotide
  modified_base 80: mod_base = OTHER; note = 2'-O-methyl modified nucleotide
  modified_base 81: mod_base = OTHER; note = 2'-O-methyl modified nucleotide
  modified_base 82: mod_base = OTHER; note = 2'-O-methyl modified nucleotide
  modified_base 83: mod_base = OTHER; note = 2'-O-methyl modified nucleotide
  modified_base 84: mod_base = OTHER; note = 2'-O-methyl modified nucleotide
  modified_base 85: mod_base = OTHER; note = 2'-O-methyl modified nucleotide
  modified_base 86: mod_base = OTHER; note = 2'-O-methyl modified nucleotide
  modified_base 87: mod_base = OTHER; note = 2'-O-methyl modified nucleotide
  modified_base 88: mod_base = OTHER; note = 2'-O-methyl modified nucleotide
  modified_base 89: mod_base = OTHER; note = 2'-O-methyl modified nucleotide
  modified_base 90: mod_base = OTHER; note = 2'-O-methyl modified nucleotide
  modified_base 91: mod_base = OTHER; note = 2'-O-methyl modified nucleotide
  modified_base 92: mod_base = OTHER; note = 2'-O-methyl modified nucleotide
  modified_base 93: mod_base = OTHER; note = 2'-O-methyl modified nucleotide
  modified_base 94: mod_base = OTHER; note = 2'-O-methyl modified nucleotide
  modified_base 95: mod_base = OTHER; note = 2'-O-methyl modified nucleotide
  modified_base 96: mod_base = OTHER; note = 2'-O-methyl modified nucleotide
  modified_base 97: mod_base = OTHER; note = 2'-O-methyl modified nucleotide with phosphorothioate linkage
  modified_base 98: mod_base = OTHER; note = 2'-O-methyl modified nucleotide with phosphorothioate linkage
  modified_base 99: mod_base = OTHER; note = 2'-O-methyl modified nucleotide with phosphorothioate linkage
  modified_base 100: mod_base = OTHER; note = 2'-O-methyl modified nucleotide

SEQ ID NO: 233 - RNA, 100 nt, synthetic construct; identical to SEQ ID NO: 200
  source 1..100: mol_type = other RNA; note = Description of Artificial Sequence: Synthetic polynucleotide
  modified_base 1: mod_base = OTHER; note = 2'-O-methyl modified nucleotide with phosphorothioate linkage
  modified_base 2: mod_base = OTHER; note = 2'-O-methyl modified nucleotide with phosphorothioate linkage
  modified_base 3: mod_base = OTHER; note = 2'-O-methyl modified nucleotide with phosphorothioate linkage
  modified_base 29: mod_base = OTHER; note = 2'-O-methyl modified nucleotide
  modified_base 30: mod_base = OTHER; note = 2'-O-methyl modified nucleotide
  modified_base 31: mod_base = OTHER; note = 2'-O-methyl modified nucleotide
  modified_base 32: mod_base = OTHER; note = 2'-O-methyl modified nucleotide
  modified_base 33: mod_base = OTHER; note = 2'-O-methyl modified nucleotide
  modified_base 34: mod_base = OTHER; note = 2'-O-methyl modified nucleotide
  modified_base 35: mod_base = OTHER; note = 2'-O-methyl modified nucleotide
  modified_base 36: mod_base = OTHER; note = 2'-O-methyl modified nucleotide
  modified_base 37: mod_base = OTHER; note = 2'-O-methyl modified nucleotide
  modified_base 38: mod_base = OTHER; note = 2'-O-methyl modified nucleotide
  modified_base 39: mod_base = OTHER; note = 2'-O-methyl modified nucleotide
  modified_base 40: mod_base = OTHER; note = 2'-O-methyl modified nucleotide
  modified_base 69: mod_base = OTHER; note = 2'-O-methyl modified nucleotide
  modified_base 70: mod_base = OTHER; note = 2'-O-methyl modified nucleotide
  modified_base 71: mod_base = OTHER; note = 2'-O-methyl modified nucleotide
  modified_base 72: mod_base = OTHER; note = 2'-O-methyl modified nucleotide
  modified_base 73: mod_base = OTHER; note = 2'-O-methyl modified nucleotide
  modified_base 74: mod_base = OTHER; note = 2'-O-methyl modified nucleotide
  modified_base 75: mod_base = OTHER; note = 2'-O-methyl modified nucleotide
  modified_base 76: mod_base = OTHER; note = 2'-O-methyl modified nucleotide
  modified_base 77: mod_base = OTHER; note = 2'-O-methyl modified nucleotide
  modified_base 78: mod_base = OTHER; note = 2'-O-methyl modified nucleotide
  modified_base 79: mod_base = OTHER; note = 2'-O-methyl modified nucleotide
  modified_base 80: mod_base = OTHER; note = 2'-O-methyl modified nucleotide
  modified_base 81: mod_base = OTHER; note = 2'-O-methyl modified nucleotide
  modified_base 82: mod_base = OTHER; note = 2'-O-methyl modified nucleotide
  modified_base 83: mod_base = OTHER; note = 2'-O-methyl modified nucleotide
  modified_base 84: mod_base = OTHER; note = 2'-O-methyl modified nucleotide
  modified_base 85: mod_base = OTHER; note = 2'-O-methyl modified nucleotide
  modified_base 86: mod_base = OTHER; note = 2'-O-methyl modified nucleotide
  modified_base 87: mod_base = OTHER; note = 2'-O-methyl modified nucleotide
  modified_base 88: mod_base = OTHER; note = 2'-O-methyl modified nucleotide
  modified_base 89: mod_base = OTHER; note = 2'-O-methyl modified nucleotide
  modified_base 90: mod_base = OTHER; note = 2'-O-methyl modified nucleotide
  modified_base 91: mod_base = OTHER; note = 2'-O-methyl modified nucleotide
  modified_base 92: mod_base = OTHER; note = 2'-O-methyl modified nucleotide
  modified_base 93: mod_base = OTHER; note = 2'-O-methyl modified nucleotide
  modified_base 94: mod_base = OTHER; note = 2'-O-methyl modified nucleotide
  modified_base 95: mod_base = OTHER; note = 2'-O-methyl modified nucleotide
  modified_base 96: mod_base = OTHER; note = 2'-O-methyl modified nucleotide
  modified_base 97: mod_base = OTHER; note = 2'-O-methyl modified nucleotide with phosphorothioate linkage
  modified_base 98: mod_base = OTHER; note = 2'-O-methyl modified nucleotide with phosphorothioate linkage
  modified_base 99: mod_base = OTHER; note = 2'-O-methyl modified nucleotide with phosphorothioate linkage
  modified_base 100: mod_base = OTHER; note = 2'-O-methyl modified nucleotide

SEQ ID NO: 234 - RNA, 100 nt, synthetic construct; identical to SEQ ID NO: 201
  source 1..100: mol_type = other RNA; note = Description of Artificial Sequence: Synthetic polynucleotide
  modified_base 1: mod_base = OTHER; note = 2'-O-methyl modified nucleotide with phosphorothioate linkage
  modified_base 2: mod_base = OTHER; note = 2'-O-methyl modified nucleotide with phosphorothioate linkage
  modified_base 3: mod_base = OTHER; note = 2'-O-methyl modified nucleotide with phosphorothioate linkage
  modified_base 29: mod_base = OTHER; note = 2'-O-methyl modified nucleotide
  modified_base 30: mod_base = OTHER; note = 2'-O-methyl modified nucleotide
  modified_base 31: mod_base = OTHER; note = 2'-O-methyl modified nucleotide
  modified_base 32: mod_base = OTHER; note = 2'-O-methyl modified nucleotide
  modified_base 33: mod_base = OTHER; note = 2'-O-methyl modified nucleotide
  modified_base 34: mod_base = OTHER; note = 2'-O-methyl modified nucleotide
  modified_base 35: mod_base = OTHER; note = 2'-O-methyl modified nucleotide
  modified_base 36: mod_base = OTHER; note = 2'-O-methyl modified nucleotide
  modified_base 37: mod_base = OTHER; note = 2'-O-methyl modified nucleotide
  modified_base 38: mod_base = OTHER; note = 2'-O-methyl modified nucleotide
  modified_base 39: mod_base = OTHER; note = 2'-O-methyl modified nucleotide
  modified_base 40: mod_base = OTHER; note = 2'-O-methyl modified nucleotide
  modified_base 69: mod_base = OTHER; note = 2'-O-methyl modified nucleotide
  modified_base 70: mod_base = OTHER; note = 2'-O-methyl modified nucleotide
  modified_base 71: mod_base = OTHER; note = 2'-O-methyl modified nucleotide
  modified_base 72: mod_base = OTHER; note = 2'-O-methyl modified nucleotide
  modified_base 73: mod_base = OTHER; note = 2'-O-methyl modified nucleotide
  modified_base 74: mod_base = OTHER; note = 2'-O-methyl modified nucleotide
  modified_base 75: mod_base = OTHER; note = 2'-O-methyl modified nucleotide
  modified_base 76: mod_base = OTHER; note = 2'-O-methyl modified nucleotide
  modified_base 77: mod_base = OTHER; note = 2'-O-methyl modified nucleotide
  modified_base 78: mod_base = OTHER; note = 2'-O-methyl modified nucleotide
  modified_base 79: mod_base = OTHER; note = 2'-O-methyl modified nucleotide
  modified_base 80: mod_base = OTHER; note = 2'-O-methyl modified nucleotide
  modified_base 81: mod_base = OTHER; note = 2'-O-methyl modified nucleotide
  modified_base 82: mod_base = OTHER; note = 2'-O-methyl modified nucleotide
  modified_base 83: mod_base = OTHER; note = 2'-O-methyl modified nucleotide
  modified_base 84: mod_base = OTHER; note = 2'-O-methyl modified nucleotide
  modified_base 85: mod_base = OTHER; note = 2'-O-methyl modified nucleotide
  modified_base 86: mod_base = OTHER; note = 2'-O-methyl modified nucleotide
  modified_base 87: mod_base = OTHER; note = 2'-O-methyl modified nucleotide
  modified_base 88: mod_base = OTHER; note = 2'-O-methyl modified nucleotide
  modified_base 89: mod_base = OTHER; note = 2'-O-methyl modified nucleotide
  modified_base 90: mod_base = OTHER; note = 2'-O-methyl modified nucleotide
  modified_base 91: mod_base = OTHER; note = 2'-O-methyl modified nucleotide
  modified_base 92: mod_base = OTHER; note = 2'-O-methyl modified nucleotide
  modified_base 93: mod_base = OTHER; note = 2'-O-methyl modified nucleotide
  modified_base 94: mod_base = OTHER; note = 2'-O-methyl modified nucleotide
  modified_base 95: mod_base = OTHER; note = 2'-O-methyl modified nucleotide
  modified_base 96: mod_base = OTHER; note = 2'-O-methyl modified nucleotide
  modified_base 97: mod_base = OTHER; note = 2'-O-methyl modified nucleotide with phosphorothioate linkage
  modified_base 98: mod_base = OTHER; note = 2'-O-methyl modified nucleotide with phosphorothioate linkage
  modified_base 99: mod_base = OTHER; note = 2'-O-methyl modified nucleotide with phosphorothioate linkage
  modified_base 100: mod_base = OTHER; note = 2'-O-methyl modified nucleotide

SEQ ID NO: 235 - RNA, 100 nt, synthetic construct; identical to SEQ ID NO: 202
  source 1..100: mol_type = other RNA; note = Description of Artificial Sequence: Synthetic polynucleotide
  modified_base 1: mod_base = OTHER; note = 2'-O-methyl modified nucleotide with phosphorothioate linkage
  modified_base 2: mod_base = OTHER; note = 2'-O-methyl modified nucleotide with phosphorothioate linkage
  modified_base 3: mod_base = OTHER; note = 2'-O-methyl modified nucleotide with phosphorothioate linkage
  modified_base 29: mod_base = OTHER; note = 2'-O-methyl modified nucleotide
  modified_base 30: mod_base = OTHER; note = 2'-O-methyl modified nucleotide
  modified_base 31: mod_base = OTHER; note = 2'-O-methyl modified nucleotide
  modified_base 32: mod_base = OTHER; note = 2'-O-methyl modified nucleotide
  modified_base 33: mod_base = OTHER; note = 2'-O-methyl modified nucleotide
  modified_base 34: mod_base = OTHER; note = 2'-O-methyl modified nucleotide
  modified_base 35: mod_base = OTHER; note = 2'-O-methyl modified nucleotide
  modified_base 36: mod_base = OTHER; note = 2'-O-methyl modified nucleotide
  modified_base 37: mod_base = OTHER; note = 2'-O-methyl modified nucleotide
  modified_base 38: mod_base = OTHER; note = 2'-O-methyl modified nucleotide
  modified_base 39: mod_base = OTHER; note = 2'-O-methyl modified nucleotide
  modified_base 40: mod_base = OTHER; note = 2'-O-methyl modified nucleotide
  modified_base 69: mod_base = OTHER; note = 2'-O-methyl modified nucleotide
  modified_base 70: mod_base = OTHER; note = 2'-O-methyl modified nucleotide
  modified_base 71: mod_base = OTHER; note = 2'-O-methyl modified nucleotide
  modified_base 72: mod_base = OTHER; note = 2'-O-methyl modified nucleotide
  modified_base 73: mod_base = OTHER; note = 2'-O-methyl modified nucleotide
  modified_base 74: mod_base = OTHER; note = 2'-O-methyl modified nucleotide
  modified_base 75: mod_base = OTHER; note = 2'-O-methyl modified nucleotide
  modified_base 76: mod_base = OTHER; note = 2'-O-methyl modified nucleotide
  modified_base 77: mod_base = OTHER; note = 2'-O-methyl modified nucleotide
  modified_base 78: mod_base = OTHER; note = 2'-O-methyl modified nucleotide
  modified_base 79: mod_base = OTHER; note = 2'-O-methyl modified nucleotide
  modified_base 80: mod_base = OTHER; note = 2'-O-methyl modified nucleotide
  modified_base 81: mod_base = OTHER; note = 2'-O-methyl modified nucleotide
  modified_base 82: mod_base = OTHER; note = 2'-O-methyl modified nucleotide
  modified_base 83: mod_base = OTHER; note = 2'-O-methyl modified nucleotide
  modified_base 84: mod_base = OTHER; note = 2'-O-methyl modified nucleotide
  modified_base 85: mod_base = OTHER; note = 2'-O-methyl modified nucleotide
  modified_base 86: mod_base = OTHER; note = 2'-O-methyl modified nucleotide
  modified_base 87: mod_base = OTHER; note = 2'-O-methyl modified nucleotide
  modified_base 88: mod_base = OTHER; note = 2'-O-methyl modified nucleotide
  modified_base 89: mod_base = OTHER; note = 2'-O-methyl modified nucleotide
  modified_base 90: mod_base = OTHER; note = 2'-O-methyl modified nucleotide
  modified_base 91: mod_base = OTHER; note = 2'-O-methyl modified nucleotide
  modified_base 92: mod_base = OTHER; note = 2'-O-methyl modified nucleotide
  modified_base 93: mod_base = OTHER; note = 2'-O-methyl modified nucleotide
  modified_base 94: mod_base = OTHER; note = 2'-O-methyl modified nucleotide
  modified_base 95: mod_base = OTHER; note = 2'-O-methyl modified nucleotide
  modified_base 96: mod_base = OTHER; note = 2'-O-methyl modified nucleotide
  modified_base 97: mod_base = OTHER; note = 2'-O-methyl modified nucleotide with phosphorothioate linkage
  modified_base 98: mod_base = OTHER; note = 2'-O-methyl modified nucleotide with phosphorothioate linkage
  modified_base 99: mod_base = OTHER; note = 2'-O-methyl modified nucleotide with phosphorothioate linkage
  modified_base 100: mod_base = OTHER; note = 2'-O-methyl modified nucleotide

SEQ ID NO: 236 - RNA, 100 nt, synthetic construct; identical to SEQ ID NO: 203
  source 1..100: mol_type = other RNA; note = Description of Artificial Sequence: Synthetic polynucleotide
  modified_base 1: mod_base = OTHER; note = 2'-O-methyl modified nucleotide with phosphorothioate linkage
  modified_base 2: mod_base = OTHER; note = 2'-O-methyl modified nucleotide with phosphorothioate linkage
  modified_base 3: mod_base = OTHER; note = 2'-O-methyl modified nucleotide with phosphorothioate linkage
  modified_base 29: mod_base = OTHER; note = 2'-O-methyl modified nucleotide
  modified_base 30: mod_base = OTHER; note = 2'-O-methyl modified nucleotide
  modified_base 31: mod_base = OTHER; note = 2'-O-methyl modified nucleotide
  modified_base 32: mod_base = OTHER; note = 2'-O-methyl modified nucleotide
  modified_base 33: mod_base = OTHER; note = 2'-O-methyl modified nucleotide
  modified_base 34: mod_base = OTHER; note = 2'-O-methyl modified nucleotide
  modified_base 35: mod_base = OTHER; note = 2'-O-methyl modified nucleotide
  modified_base 36: mod_base = OTHER; note = 2'-O-methyl modified nucleotide
  modified_base 37: mod_base = OTHER; note = 2'-O-methyl modified nucleotide
  modified_base 38: mod_base = OTHER; note = 2'-O-methyl modified nucleotide
  modified_base 39: mod_base = OTHER; note = 2'-O-methyl modified nucleotide
  modified_base 40: mod_base = OTHER; note = 2'-O-methyl modified nucleotide
  modified_base 69: mod_base = OTHER; note = 2'-O-methyl modified nucleotide
  modified_base 70: mod_base = OTHER; note = 2'-O-methyl modified nucleotide
  modified_base 71: mod_base = OTHER; note = 2'-O-methyl modified nucleotide
  modified_base 72: mod_base = OTHER; note = 2'-O-methyl modified nucleotide
  modified_base 73: mod_base = OTHER; note = 2'-O-methyl modified nucleotide
  modified_base 74: mod_base = OTHER; note = 2'-O-methyl modified nucleotide
  modified_base 75: mod_base = OTHER; note = 2'-O-methyl modified nucleotide
  modified_base 76: mod_base = OTHER; note = 2'-O-methyl modified nucleotide
  modified_base 77: mod_base = OTHER; note = 2'-O-methyl modified nucleotide
  modified_base 78: mod_base = OTHER; note = 2'-O-methyl modified nucleotide
  modified_base 79: mod_base = OTHER; note = 2'-O-methyl modified nucleotide
  modified_base 80: mod_base = OTHER; note = 2'-O-methyl modified nucleotide
  modified_base 81: mod_base = OTHER; note = 2'-O-methyl modified nucleotide
  modified_base 82: mod_base = OTHER; note = 2'-O-methyl modified nucleotide
  modified_base 83: mod_base = OTHER; note = 2'-O-methyl modified nucleotide
  modified_base 84: mod_base = OTHER; note = 2'-O-methyl modified nucleotide
  modified_base 85: mod_base = OTHER; note = 2'-O-methyl modified nucleotide
  modified_base 86: mod_base = OTHER; note = 2'-O-methyl modified nucleotide
  modified_base 87: mod_base = OTHER; note = 2'-O-methyl modified nucleotide
  modified_base 88: mod_base = OTHER; note = 2'-O-methyl modified nucleotide
  modified_base 89: mod_base = OTHER; note = 2'-O-methyl modified nucleotide
  modified_base 90: mod_base = OTHER; note = 2'-O-methyl modified nucleotide
  modified_base 91: mod_base = OTHER; note = 2'-O-methyl modified nucleotide
  modified_base 92: mod_base = OTHER; note = 2'-O-methyl modified nucleotide
  modified_base 93: mod_base = OTHER; note = 2'-O-methyl modified nucleotide
  modified_base 94: mod_base = OTHER; note = 2'-O-methyl modified nucleotide
  modified_base 95: mod_base = OTHER; note = 2'-O-methyl modified nucleotide
  modified_base 96: mod_base = OTHER; note = 2'-O-methyl modified nucleotide
  modified_base 97: mod_base = OTHER; note = 2'-O-methyl modified nucleotide with phosphorothioate linkage
  modified_base 98: mod_base = OTHER; note = 2'-O-methyl modified nucleotide with phosphorothioate linkage
  modified_base 99: mod_base = OTHER; note = 2'-O-methyl modified nucleotide with phosphorothioate linkage
  modified_base 100: mod_base = OTHER; note = 2'-O-methyl modified nucleotide

SEQ ID NO: 237 - RNA, 100 nt, synthetic construct; identical to SEQ ID NO: 35
  source 1..100: mol_type = other RNA; note = Description of Artificial Sequence: Synthetic polynucleotide
  modified_base 1: mod_base = OTHER; note = 2'-O-methyl modified nucleotide with phosphorothioate linkage
  modified_base 2: mod_base = OTHER; note = 2'-O-methyl modified nucleotide with phosphorothioate linkage
  modified_base 3: mod_base = OTHER; note = 2'-O-methyl modified nucleotide with phosphorothioate linkage
  modified_base 29: mod_base = OTHER; note = 2'-O-methyl modified nucleotide
  modified_base 30: mod_base = OTHER; note = 2'-O-methyl modified nucleotide
  modified_base 31: mod_base = OTHER; note = 2'-O-methyl modified nucleotide
  modified_base 32: mod_base = OTHER; note = 2'-O-methyl modified nucleotide
  modified_base 33: mod_base = OTHER; note = 2'-O-methyl modified nucleotide
  modified_base 34: mod_base = OTHER; note = 2'-O-methyl modified nucleotide
  modified_base 35: mod_base = OTHER; note = 2'-O-methyl modified nucleotide
  modified_base 36: mod_base = OTHER; note = 2'-O-methyl modified nucleotide
  modified_base 37: mod_base = OTHER; note = 2'-O-methyl modified nucleotide
  modified_base 38: mod_base = OTHER; note = 2'-O-methyl modified nucleotide
  modified_base 39: mod_base = OTHER; note = 2'-O-methyl modified nucleotide
  modified_base 40: mod_base = OTHER; note = 2'-O-methyl modified nucleotide
  modified_base 69: mod_base = OTHER; note = 2'-O-methyl modified nucleotide
  modified_base 70: mod_base = OTHER; note = 2'-O-methyl modified nucleotide
  modified_base 71: mod_base = OTHER; note = 2'-O-methyl modified nucleotide
  modified_base 72: mod_base = OTHER; note = 2'-O-methyl modified nucleotide
  modified_base 73: mod_base = OTHER; note = 2'-O-methyl modified nucleotide
  modified_base 74: mod_base = OTHER; note = 2'-O-methyl modified nucleotide
  modified_base 75: mod_base = OTHER; note = 2'-O-methyl modified nucleotide
  modified_base 76: mod_base = OTHER; note = 2'-O-methyl modified nucleotide
  modified_base 77: mod_base = OTHER; note = 2'-O-methyl modified nucleotide
  modified_base 78: mod_base = OTHER; note = 2'-O-methyl modified nucleotide
  modified_base 79: mod_base = OTHER; note = 2'-O-methyl modified nucleotide
  modified_base 80: mod_base = OTHER; note = 2'-O-methyl modified nucleotide
  modified_base 81: mod_base = OTHER; note = 2'-O-methyl modified nucleotide
  modified_base 82: mod_base = OTHER; note = 2'-O-methyl modified nucleotide
  modified_base 83: mod_base = OTHER; note = 2'-O-methyl modified nucleotide
  modified_base 84: mod_base = OTHER; note = 2'-O-methyl modified nucleotide
  modified_base 85: mod_base = OTHER; note = 2'-O-methyl modified nucleotide
  modified_base 86: mod_base = OTHER; note = 2'-O-methyl modified nucleotide
  modified_base 87: mod_base = OTHER; note = 2'-O-methyl modified nucleotide
  modified_base 88: mod_base = OTHER; note = 2'-O-methyl modified nucleotide
  modified_base 89: mod_base = OTHER; note = 2'-O-methyl modified nucleotide
  modified_base 90: mod_base = OTHER; note = 2'-O-methyl modified nucleotide
  modified_base 91: mod_base = OTHER; note = 2'-O-methyl modified nucleotide
  modified_base 92: mod_base = OTHER; note = 2'-O-methyl modified nucleotide
  modified_base 93: mod_base = OTHER; note = 2'-O-methyl modified nucleotide
  modified_base 94: mod_base = OTHER; note = 2'-O-methyl modified nucleotide
  modified_base 95: mod_base = OTHER; note = 2'-O-methyl modified nucleotide
  modified_base 96: mod_base = OTHER; note = 2'-O-methyl modified nucleotide
  modified_base 97: mod_base = OTHER; note = 2'-O-methyl modified nucleotide with phosphorothioate linkage
  modified_base 98: mod_base = OTHER; note = 2'-O-methyl modified nucleotide with phosphorothioate linkage
  modified_base 99: mod_base = OTHER; note = 2'-O-methyl modified nucleotide with phosphorothioate linkage
  modified_base 100: mod_base = OTHER; note = 2'-O-methyl modified nucleotide

SEQ ID NO: 238 - RNA, 100 nt, synthetic construct; identical to SEQ ID NO: 36
  source 1..100: mol_type = other RNA; note = Description of Artificial Sequence: Synthetic polynucleotide
  modified_base 1: mod_base = OTHER; note = 2'-O-methyl modified nucleotide with phosphorothioate linkage
  modified_base 2: mod_base = OTHER; note = 2'-O-methyl modified nucleotide with phosphorothioate linkage
  modified_base 3: mod_base = OTHER; note = 2'-O-methyl modified nucleotide with phosphorothioate linkage
  modified_base 29: mod_base = OTHER; note = 2'-O-methyl modified nucleotide
  modified_base 30: mod_base = OTHER; note = 2'-O-methyl modified nucleotide
  modified_base 31: mod_base = OTHER; note = 2'-O-methyl modified nucleotide
  modified_base 32: mod_base = OTHER; note = 2'-O-methyl modified nucleotide
  modified_base 33: mod_base = OTHER; note = 2'-O-methyl modified nucleotide
  modified_base 34: mod_base = OTHER; note = 2'-O-methyl modified nucleotide
  modified_base 35: mod_base = OTHER; note = 2'-O-methyl modified nucleotide
  modified_base 36: mod_base = OTHER; note = 2'-O-methyl modified nucleotide
  modified_base 37: mod_base = OTHER; note = 2'-O-methyl modified nucleotide
  modified_base 38: mod_base = OTHER; note = 2'-O-methyl modified nucleotide
  modified_base 39: mod_base = OTHER; note = 2'-O-methyl modified nucleotide
  modified_base 40: mod_base = OTHER; note = 2'-O-methyl modified nucleotide
  modified_base 69: mod_base = OTHER; note = 2'-O-methyl modified nucleotide
  modified_base 70: mod_base = OTHER; note = 2'-O-methyl modified nucleotide
  modified_base 71: mod_base = OTHER; note = 2'-O-methyl modified nucleotide
  modified_base 72: mod_base = OTHER; note = 2'-O-methyl modified nucleotide
  modified_base 73: mod_base = OTHER; note = 2'-O-methyl modified nucleotide
  modified_base 74: mod_base = OTHER; note = 2'-O-methyl modified nucleotide
  modified_base 75: mod_base = OTHER; note = 2'-O-methyl modified nucleotide
  modified_base 76: mod_base = OTHER; note = 2'-O-methyl modified nucleotide
  modified_base 77: mod_base = OTHER; note = 2'-O-methyl modified nucleotide
  modified_base 78: mod_base = OTHER; note = 2'-O-methyl modified nucleotide
  modified_base 79: mod_base = OTHER; note = 2'-O-methyl modified nucleotide
  modified_base 80: mod_base = OTHER; note = 2'-O-methyl modified nucleotide
  modified_base 81: mod_base = OTHER; note = 2'-O-methyl modified nucleotide
  modified_base 82: mod_base = OTHER; note = 2'-O-methyl modified nucleotide
  modified_base 83: mod_base = OTHER; note = 2'-O-methyl modified nucleotide
  modified_base 84: mod_base = OTHER; note = 2'-O-methyl modified nucleotide
  modified_base 85: mod_base = OTHER; note = 2'-O-methyl modified nucleotide
  modified_base 86: mod_base = OTHER; note = 2'-O-methyl modified nucleotide
  modified_base 87: mod_base = OTHER; note = 2'-O-methyl modified nucleotide
  modified_base 88: mod_base = OTHER; note = 2'-O-methyl modified nucleotide
  modified_base 89: mod_base = OTHER; note = 2'-O-methyl modified nucleotide
  modified_base 90: mod_base = OTHER; note = 2'-O-methyl modified nucleotide
  modified_base 91: mod_base = OTHER; note = 2'-O-methyl modified nucleotide
  modified_base 92: mod_base = OTHER; note = 2'-O-methyl modified nucleotide
  modified_base 93: mod_base = OTHER; note = 2'-O-methyl modified nucleotide
  modified_base 94: mod_base = OTHER; note = 2'-O-methyl modified nucleotide
  modified_base 95: mod_base = OTHER; note = 2'-O-methyl modified nucleotide
  modified_base 96: mod_base = OTHER; note = 2'-O-methyl modified nucleotide
  modified_base 97: mod_base = OTHER; note = 2'-O-methyl modified nucleotide with phosphorothioate linkage
  modified_base 98: mod_base = OTHER; note = 2'-O-methyl modified nucleotide with phosphorothioate linkage
  modified_base 99: mod_base = OTHER; note = 2'-O-methyl modified nucleotide with phosphorothioate linkage
  modified_base 100: mod_base = OTHER; note = 2'-O-methyl modified nucleotide

SEQ ID NO: 239 - RNA, 100 nt, synthetic construct; identical to SEQ ID NO: 206
  source 1..100: mol_type = other RNA; note = Description of Artificial Sequence: Synthetic polynucleotide
  modified_base 1: mod_base = OTHER; note = 2'-O-methyl modified nucleotide with phosphorothioate linkage
  modified_base 2: mod_base = OTHER; note = 2'-O-methyl modified nucleotide with phosphorothioate linkage
  modified_base 3: mod_base = OTHER; note = 2'-O-methyl modified nucleotide with phosphorothioate linkage
  modified_base 29: mod_base = OTHER; note = 2'-O-methyl modified nucleotide
  modified_base 30: mod_base = OTHER; note = 2'-O-methyl modified nucleotide
  modified_base 31: mod_base = OTHER; note = 2'-O-methyl modified nucleotide
  modified_base 32: mod_base = OTHER; note = 2'-O-methyl modified nucleotide
  modified_base 33: mod_base = OTHER; note = 2'-O-methyl modified nucleotide
  modified_base 34: mod_base = OTHER; note = 2'-O-methyl modified nucleotide
  modified_base 35: mod_base = OTHER; note = 2'-O-methyl modified nucleotide
  modified_base 36: mod_base = OTHER; note = 2'-O-methyl modified nucleotide
  modified_base 37: mod_base = OTHER; note = 2'-O-methyl modified nucleotide
  modified_base 38: mod_base = OTHER; note = 2'-O-methyl modified nucleotide
  modified_base 39: mod_base = OTHER; note = 2'-O-methyl modified nucleotide
  modified_base 40: mod_base = OTHER; note = 2'-O-methyl modified nucleotide
  modified_base 69: mod_base = OTHER; note = 2'-O-methyl modified nucleotide
  modified_base 70: mod_base = OTHER; note = 2'-O-methyl modified nucleotide
  modified_base 71: mod_base = OTHER; note = 2'-O-methyl modified nucleotide
  modified_base 72: mod_base = OTHER; note = 2'-O-methyl modified nucleotide
  modified_base 73: mod_base = OTHER; note = 2'-O-methyl modified nucleotide
  modified_base 74: mod_base = OTHER; note = 2'-O-methyl modified nucleotide
  modified_base 75: mod_base = OTHER; note = 2'-O-methyl modified nucleotide
  modified_base 76: mod_base = OTHER; note = 2'-O-methyl modified nucleotide
  modified_base 77: mod_base = OTHER; note = 2'-O-methyl modified nucleotide
  modified_base 78: mod_base = OTHER; note = 2'-O-methyl modified nucleotide
  modified_base 79: mod_base = OTHER; note = 2'-O-methyl modified nucleotide
  modified_base 80: mod_base = OTHER; note = 2'-O-methyl modified nucleotide
  modified_base 81: mod_base = OTHER; note = 2'-O-methyl modified nucleotide
  modified_base 82: mod_base = OTHER; note = 2'-O-methyl modified nucleotide
  modified_base 83: mod_base = OTHER; note = 2'-O-methyl modified nucleotide
  modified_base 84: mod_base = OTHER; note = 2'-O-methyl modified nucleotide
  modified_base 85: mod_base = OTHER; note = 2'-O-methyl modified nucleotide
  modified_base 86: mod_base = OTHER; note = 2'-O-methyl modified nucleotide
  modified_base 87: mod_base = OTHER; note = 2'-O-methyl modified nucleotide
  modified_base 88: mod_base = OTHER; note = 2'-O-methyl modified nucleotide
  modified_base 89: mod_base = OTHER; note = 2'-O-methyl modified nucleotide
  modified_base 90: mod_base = OTHER; note = 2'-O-methyl modified nucleotide
  modified_base 91: mod_base = OTHER; note = 2'-O-methyl modified nucleotide
  modified_base 92: mod_base = OTHER; note = 2'-O-methyl modified nucleotide
  modified_base 93: mod_base = OTHER; note = 2'-O-methyl modified nucleotide
  modified_base 94: mod_base = OTHER; note = 2'-O-methyl modified nucleotide
  modified_base 95: mod_base = OTHER; note = 2'-O-methyl modified nucleotide
  modified_base 96: mod_base = OTHER; note = 2'-O-methyl modified nucleotide
  modified_base 97: mod_base = OTHER; note = 2'-O-methyl modified nucleotide with phosphorothioate linkage
  modified_base 98: mod_base = OTHER; note = 2'-O-methyl modified nucleotide with phosphorothioate linkage
  modified_base 99: mod_base = OTHER; note = 2'-O-methyl modified nucleotide with phosphorothioate linkage
  modified_base 100: mod_base = OTHER; note = 2'-O-methyl modified nucleotide

SEQ ID NO: 240 - RNA, 100 nt, synthetic construct; identical to SEQ ID NO: 207
  source 1..100: mol_type = other RNA; note = Description of Artificial Sequence: Synthetic polynucleotide
  modified_base 1: mod_base = OTHER; note = 2'-O-methyl modified nucleotide with phosphorothioate linkage
  modified_base 2: mod_base = OTHER; note = 2'-O-methyl modified nucleotide with phosphorothioate linkage
  modified_base 3: mod_base = OTHER; note = 2'-O-methyl modified nucleotide with phosphorothioate linkage
  modified_base 29: mod_base = OTHER; note = 2'-O-methyl modified nucleotide
  modified_base 30: mod_base = OTHER; note = 2'-O-methyl modified nucleotide
  modified_base 31: mod_base = OTHER; note = 2'-O-methyl modified nucleotide
  modified_base 32: mod_base = OTHER; note = 2'-O-methyl modified nucleotide
  modified_base 33: mod_base = OTHER; note = 2'-O-methyl modified nucleotide
  modified_base 34: mod_base = OTHER; note = 2'-O-methyl modified nucleotide
  modified_base 35: mod_base = OTHER; note = 2'-O-methyl modified nucleotide
  modified_base 36: mod_base = OTHER; note = 2'-O-methyl modified nucleotide
  modified_base 37: mod_base = OTHER; note = 2'-O-methyl modified nucleotide
  modified_base 38: mod_base = OTHER; note = 2'-O-methyl modified nucleotide
  modified_base 39: mod_base = OTHER; note = 2'-O-methyl modified nucleotide
  modified_base 40: mod_base = OTHER; note = 2'-O-methyl modified nucleotide
  modified_base 69: mod_base = OTHER; note = 2'-O-methyl modified nucleotide
  modified_base 70: mod_base = OTHER; note = 2'-O-methyl modified nucleotide
  modified_base 71: mod_base = OTHER; note = 2'-O-methyl modified nucleotide
  modified_base 72: mod_base = OTHER; note = 2'-O-methyl modified nucleotide
  modified_base 73: mod_base = OTHER; note = 2'-O-methyl modified nucleotide
  modified_base 74: mod_base = OTHER; note = 2'-O-methyl modified nucleotide
  modified_base 75: mod_base = OTHER; note = 2'-O-methyl modified nucleotide
  modified_base 76: mod_base = OTHER; note = 2'-O-methyl modified nucleotide
  modified_base 77: mod_base = OTHER; note = 2'-O-methyl modified nucleotide
  modified_base 78: mod_base = OTHER; note = 2'-O-methyl modified nucleotide
  modified_base 79: mod_base = OTHER; note = 2'-O-methyl modified nucleotide
  modified_base 80: mod_base = OTHER; note = 2'-O-methyl modified nucleotide
  modified_base 81: mod_base = OTHER; note = 2'-O-methyl modified nucleotide
  modified_base 82: mod_base = OTHER; note = 2'-O-methyl modified nucleotide
  modified_base 83: mod_base = OTHER; note = 2'-O-methyl modified nucleotide
  modified_base 84: mod_base = OTHER; note = 2'-O-methyl modified nucleotide
  modified_base 85: mod_base = OTHER; note = 2'-O-methyl modified nucleotide
  modified_base 86: mod_base = OTHER; note = 2'-O-methyl modified nucleotide
  modified_base 87: mod_base = OTHER; note = 2'-O-methyl modified nucleotide
  modified_base 88: mod_base = OTHER; note = 2'-O-methyl modified nucleotide
  modified_base 89: mod_base = OTHER; note = 2'-O-methyl modified nucleotide
  modified_base 90: mod_base = OTHER; note = 2'-O-methyl modified nucleotide
  modified_base 91: mod_base = OTHER; note = 2'-O-methyl modified nucleotide
  modified_base 92: mod_base = OTHER; note = 2'-O-methyl modified nucleotide
  modified_base 93: mod_base = OTHER; note = 2'-O-methyl modified nucleotide
  modified_base 94: mod_base = OTHER; note = 2'-O-methyl modified nucleotide
  modified_base 95: mod_base = OTHER; note = 2'-O-methyl modified nucleotide
  modified_base 96: mod_base = OTHER; note = 2'-O-methyl modified nucleotide
  modified_base 97: mod_base = OTHER; note = 2'-O-methyl modified nucleotide with phosphorothioate linkage
  modified_base 98: mod_base = OTHER; note = 2'-O-methyl modified nucleotide with phosphorothioate linkage
  modified_base 99: mod_base = OTHER; note = 2'-O-methyl modified nucleotide with phosphorothioate linkage
  modified_base 100: mod_base = OTHER; note = 2'-O-methyl modified nucleotide

SEQ ID NO: 241 - RNA, 100 nt, synthetic construct; identical to SEQ ID NO: 208
  source 1..100: mol_type = other RNA; note = Description of Artificial Sequence: Synthetic polynucleotide
  modified_base 1: mod_base = OTHER; note = 2'-O-methyl modified nucleotide with phosphorothioate linkage
  modified_base 2: mod_base = OTHER; note = 2'-O-methyl modified nucleotide with phosphorothioate linkage
  modified_base 3: mod_base = OTHER; note = 2'-O-methyl modified nucleotide with phosphorothioate linkage
  modified_base 29: mod_base = OTHER; note = 2'-O-methyl modified nucleotide
  modified_base 30: mod_base = OTHER; note = 2'-O-methyl modified nucleotide
  modified_base 31: mod_base = OTHER; note = 2'-O-methyl modified nucleotide
  modified_base 32: mod_base = OTHER; note = 2'-O-methyl modified nucleotide
  modified_base 33: mod_base = OTHER; note = 2'-O-methyl modified nucleotide
  modified_base 34: mod_base = OTHER; note = 2'-O-methyl modified nucleotide
  modified_base 35: mod_base = OTHER; note = 2'-O-methyl modified nucleotide
  modified_base 36: mod_base = OTHER; note = 2'-O-methyl modified nucleotide
  modified_base 37: mod_base = OTHER; note = 2'-O-methyl modified nucleotide
  modified_base 38: mod_base = OTHER; note = 2'-O-methyl modified nucleotide
  modified_base 39: mod_base = OTHER; note = 2'-O-methyl modified nucleotide
  modified_base 40: mod_base = OTHER; note = 2'-O-methyl modified nucleotide
  modified_base 69: mod_base = OTHER; note = 2'-O-methyl modified nucleotide
  modified_base 70: mod_base = OTHER; note = 2'-O-methyl modified nucleotide
  modified_base 71: mod_base = OTHER; note = 2'-O-methyl modified nucleotide
  modified_base 72: mod_base = OTHER; note = 2'-O-methyl modified nucleotide
  modified_base 73: mod_base = OTHER; note = 2'-O-methyl modified nucleotide
  modified_base 74: mod_base = OTHER; note = 2'-O-methyl modified nucleotide
  modified_base 75: mod_base = OTHER; note = 2'-O-methyl modified nucleotide
  modified_base 76: mod_base = OTHER; note = 2'-O-methyl modified nucleotide
  modified_base 77: mod_base = OTHER; note = 2'-O-methyl modified nucleotide
  modified_base 78: mod_base = OTHER; note = 2'-O-methyl modified nucleotide
  modified_base 79: mod_base = OTHER; note = 2'-O-methyl modified nucleotide
  modified_base 80: mod_base = OTHER; note = 2'-O-methyl modified nucleotide
  modified_base 81: mod_base = OTHER; note = 2'-O-methyl modified nucleotide
  modified_base 82: mod_base = OTHER; note = 2'-O-methyl modified nucleotide
  modified_base 83: mod_base = OTHER; note = 2'-O-methyl modified nucleotide
  modified_base 84: mod_base = OTHER; note = 2'-O-methyl modified nucleotide
  modified_base 85: mod_base = OTHER; note = 2'-O-methyl modified nucleotide
  modified_base 86: mod_base = OTHER; note = 2'-O-methyl modified nucleotide
  modified_base 87: mod_base = OTHER; note = 2'-O-methyl modified nucleotide
  modified_base 88: mod_base = OTHER; note = 2'-O-methyl modified nucleotide
  modified_base 89: mod_base = OTHER; note = 2'-O-methyl modified nucleotide
  modified_base 90: mod_base = OTHER; note = 2'-O-methyl modified nucleotide
  modified_base 91: mod_base = OTHER; note = 2'-O-methyl modified nucleotide
  modified_base 92: mod_base = OTHER; note = 2'-O-methyl modified nucleotide
  modified_base 93: mod_base = OTHER; note = 2'-O-methyl modified nucleotide
  modified_base 94: mod_base = OTHER; note = 2'-O-methyl modified nucleotide
  modified_base 95: mod_base = OTHER; note = 2'-O-methyl modified nucleotide
  modified_base 96: mod_base = OTHER; note = 2'-O-methyl modified nucleotide
  modified_base 97: mod_base = OTHER; note = 2'-O-methyl modified nucleotide with phosphorothioate linkage
  modified_base 98: mod_base = OTHER; note = 2'-O-methyl modified nucleotide with phosphorothioate linkage
  modified_base 99: mod_base = OTHER; note = 2'-O-methyl modified nucleotide with phosphorothioate linkage
  modified_base 100: mod_base = OTHER; note = 2'-O-methyl modified nucleotide

SEQ ID NO: 242 - RNA, 100 nt, synthetic construct; identical to SEQ ID NO: 209
  source 1..100: mol_type = other RNA; note = Description of Artificial Sequence: Synthetic polynucleotide
  modified_base 1: mod_base = OTHER; note = 2'-O-methyl modified nucleotide with phosphorothioate linkage
  modified_base 2: mod_base = OTHER; note = 2'-O-methyl modified nucleotide with phosphorothioate linkage
  modified_base 3: mod_base = OTHER; note = 2'-O-methyl modified nucleotide with phosphorothioate linkage
  modified_base 29: mod_base = OTHER; note = 2'-O-methyl modified nucleotide
  modified_base 30: mod_base = OTHER; note = 2'-O-methyl modified nucleotide
  modified_base 31: mod_base = OTHER; note = 2'-O-methyl modified nucleotide
  modified_base 32: mod_base = OTHER; note = 2'-O-methyl modified nucleotide
  modified_base 33: mod_base = OTHER; note = 2'-O-methyl modified nucleotide
  modified_base 34: mod_base = OTHER; note = 2'-O-methyl modified nucleotide
  modified_base 35: mod_base = OTHER; note = 2'-O-methyl modified nucleotide
  modified_base 36: mod_base = OTHER; note = 2'-O-methyl modified nucleotide
  modified_base 37: mod_base = OTHER; note = 2'-O-methyl modified nucleotide
  modified_base 38: mod_base = OTHER; note = 2'-O-methyl modified nucleotide
  modified_base 39: mod_base = OTHER; note = 2'-O-methyl modified nucleotide
  modified_base 40: mod_base = OTHER; note = 2'-O-methyl modified nucleotide
  modified_base 69: mod_base = OTHER; note = 2'-O-methyl modified nucleotide
  modified_base 70: mod_base = OTHER; note = 2'-O-methyl modified nucleotide
  modified_base 71: mod_base = OTHER; note = 2'-O-methyl modified nucleotide
  modified_base 72: mod_base = OTHER; note = 2'-O-methyl modified nucleotide
  modified_base 73: mod_base = OTHER; note = 2'-O-methyl modified nucleotide
  modified_base 74: mod_base = OTHER; note = 2'-O-methyl modified nucleotide
  modified_base 75: mod_base = OTHER; note = 2'-O-methyl modified nucleotide
  modified_base 76: mod_base = OTHER; note = 2'-O-methyl modified nucleotide
  modified_base 77: mod_base = OTHER; note = 2'-O-methyl modified nucleotide
  modified_base 78: mod_base = OTHER; note = 2'-O-methyl modified nucleotide
  modified_base 79: mod_base = OTHER; note = 2'-O-methyl modified nucleotide
  modified_base 80: mod_base = OTHER; note = 2'-O-methyl modified nucleotide
  modified_base 81: mod_base = OTHER; note = 2'-O-methyl modified nucleotide
  modified_base 82: mod_base = OTHER; note = 2'-O-methyl modified nucleotide
  modified_base 83: mod_base = OTHER; note = 2'-O-methyl modified nucleotide
  modified_base 84: mod_base = OTHER; note = 2'-O-methyl modified nucleotide
  modified_base 85: mod_base = OTHER; note = 2'-O-methyl modified nucleotide
  modified_base 86: mod_base = OTHER; note = 2'-O-methyl modified nucleotide
  modified_base 87: mod_base = OTHER; note = 2'-O-methyl modified nucleotide
  modified_base 88: mod_base = OTHER; note = 2'-O-methyl modified nucleotide
  modified_base 89: mod_base = OTHER; note = 2'-O-methyl modified nucleotide
  modified_base 90: mod_base = OTHER; note = 2'-O-methyl modified nucleotide
  modified_base 91: mod_base = OTHER; note = 2'-O-methyl modified nucleotide
  modified_base 92: mod_base = OTHER; note = 2'-O-methyl modified nucleotide
  modified_base 93: mod_base = OTHER; note = 2'-O-methyl modified nucleotide
  modified_base 94: mod_base = OTHER; note = 2'-O-methyl modified nucleotide
  modified_base 95: mod_base = OTHER; note = 2'-O-methyl modified nucleotide
  modified_base 96: mod_base = OTHER; note = 2'-O-methyl modified nucleotide
  modified_base 97: mod_base = OTHER; note = 2'-O-methyl modified nucleotide with phosphorothioate linkage
  modified_base 98: mod_base = OTHER; note = 2'-O-methyl modified nucleotide with phosphorothioate linkage
  modified_base 99: mod_base = OTHER; note = 2'-O-methyl modified nucleotide with phosphorothioate linkage
  modified_base 100: mod_base = OTHER; note = 2'-O-methyl modified nucleotide

SEQ ID NO: 243 - RNA, 100 nt, synthetic construct; identical to SEQ ID NO: 37
  source 1..100: mol_type = other RNA; note = Description of Artificial Sequence: Synthetic polynucleotide
  modified_base 1: mod_base = OTHER; note = 2'-O-methyl modified nucleotide with phosphorothioate linkage
  modified_base 2: mod_base = OTHER; note = 2'-O-methyl modified nucleotide with phosphorothioate linkage
  modified_base 3: mod_base = OTHER; note = 2'-O-methyl modified nucleotide with phosphorothioate linkage
  modified_base 29: mod_base = OTHER; note = 2'-O-methyl modified nucleotide
  modified_base 30: mod_base = OTHER; note = 2'-O-methyl modified nucleotide
  modified_base 31: mod_base = OTHER; note = 2'-O-methyl modified nucleotide
  modified_base 32: mod_base = OTHER; note = 2'-O-methyl modified nucleotide
  modified_base 33: mod_base = OTHER; note = 2'-O-methyl modified nucleotide
  modified_base 34: mod_base = OTHER; note = 2'-O-methyl modified nucleotide
  modified_base 35: mod_base = OTHER; note = 2'-O-methyl modified nucleotide
  modified_base 36: mod_base = OTHER; note = 2'-O-methyl modified nucleotide
  modified_base 37: mod_base = OTHER; note = 2'-O-methyl modified nucleotide
  modified_base 38: mod_base = OTHER; note = 2'-O-methyl modified nucleotide
  modified_base 39: mod_base = OTHER; note = 2'-O-methyl modified nucleotide
  modified_base 40: mod_base = OTHER; note = 2'-O-methyl modified nucleotide
  modified_base 69: mod_base = OTHER; note = 2'-O-methyl modified nucleotide
  modified_base 70: mod_base = OTHER; note = 2'-O-methyl modified nucleotide
  modified_base 71: mod_base = OTHER; note = 2'-O-methyl modified nucleotide
  modified_base 72: mod_base = OTHER; note = 2'-O-methyl modified nucleotide
  modified_base 73: mod_base = OTHER; note = 2'-O-methyl modified nucleotide
  modified_base 74: mod_base = OTHER; note = 2'-O-methyl modified nucleotide
  modified_base 75: mod_base = OTHER; note = 2'-O-methyl modified nucleotide
  modified_base 76: mod_base = OTHER; note = 2'-O-methyl modified nucleotide
  modified_base 77: mod_base = OTHER; note = 2'-O-methyl modified nucleotide
  modified_base 78: mod_base = OTHER; note = 2'-O-methyl modified nucleotide
  modified_base 79: mod_base = OTHER; note = 2'-O-methyl modified nucleotide
  modified_base 80: mod_base = OTHER; note = 2'-O-methyl modified nucleotide
  modified_base 81: mod_base = OTHER; note = 2'-O-methyl modified nucleotide
  modified_base 82: mod_base = OTHER; note = 2'-O-methyl modified nucleotide
  modified_base 83: mod_base = OTHER; note = 2'-O-methyl modified nucleotide
  modified_base 84: mod_base = OTHER; note = 2'-O-methyl modified nucleotide
  modified_base 85: mod_base = OTHER; note = 2'-O-methyl modified nucleotide
  modified_base 86: mod_base = OTHER; note = 2'-O-methyl modified nucleotide
  modified_base 87: mod_base = OTHER; note = 2'-O-methyl modified nucleotide
  modified_base 88: mod_base = OTHER; note = 2'-O-methyl modified nucleotide
  modified_base 89: mod_base = OTHER; note = 2'-O-methyl modified nucleotide
  modified_base 90: mod_base = OTHER; note = 2'-O-methyl modified nucleotide
  modified_base 91: mod_base = OTHER; note = 2'-O-methyl modified nucleotide
  modified_base 92: mod_base = OTHER; note = 2'-O-methyl modified nucleotide
  modified_base 93: mod_base = OTHER; note = 2'-O-methyl modified nucleotide
  modified_base 94: mod_base = OTHER; note = 2'-O-methyl modified nucleotide
  modified_base 95: mod_base = OTHER; note = 2'-O-methyl modified nucleotide
  modified_base 96: mod_base = OTHER; note = 2'-O-methyl modified nucleotide
  modified_base 97: mod_base = OTHER; note = 2'-O-methyl modified nucleotide with phosphorothioate linkage
  modified_base 98: mod_base = OTHER; note = 2'-O-methyl modified nucleotide with phosphorothioate linkage
  modified_base 99: mod_base = OTHER; note = 2'-O-methyl modified nucleotide with phosphorothioate linkage
  modified_base 100: mod_base = OTHER; note = 2'-O-methyl modified nucleotide

SEQ ID NO: 244 - RNA, 100 nt, synthetic construct; identical to SEQ ID NO: 38
  source 1..100: mol_type = other RNA; note = Description of Artificial Sequence: Synthetic polynucleotide
  modified_base 1: mod_base = OTHER; note = 2'-O-methyl modified nucleotide with phosphorothioate linkage
  modified_base 2: mod_base = OTHER; note = 2'-O-methyl modified nucleotide with phosphorothioate linkage
  modified_base 3: mod_base = OTHER; note = 2'-O-methyl modified nucleotide with phosphorothioate linkage
  modified_base 29: mod_base = OTHER; note = 2'-O-methyl modified nucleotide
  modified_base 30: mod_base = OTHER; note = 2'-O-methyl modified nucleotide
  modified_base 31: mod_base = OTHER; note = 2'-O-methyl modified nucleotide
  modified_base 32: mod_base = OTHER; note = 2'-O-methyl modified nucleotide
  modified_base 33: mod_base = OTHER; note = 2'-O-methyl modified nucleotide
  modified_base 34: mod_base = OTHER; note = 2'-O-methyl modified nucleotide
  modified_base 35: mod_base = OTHER; note = 2'-O-methyl modified nucleotide
  modified_base 36: mod_base = OTHER; note = 2'-O-methyl modified nucleotide
  modified_base 37: mod_base = OTHER; note = 2'-O-methyl modified nucleotide
  modified_base 38: mod_base = OTHER; note = 2'-O-methyl modified nucleotide
  modified_base 39: mod_base = OTHER; note = 2'-O-methyl modified nucleotide
  modified_base 40: mod_base = OTHER; note = 2'-O-methyl modified nucleotide
  modified_base 69: mod_base = OTHER; note = 2'-O-methyl modified nucleotide
  modified_base 70: mod_base = OTHER; note = 2'-O-methyl modified nucleotide
  modified_base 71: mod_base = OTHER; note = 2'-O-methyl modified nucleotide
  modified_base 72: mod_base = OTHER; note = 2'-O-methyl modified nucleotide
  modified_base 73: mod_base = OTHER; note = 2'-O-methyl modified nucleotide
  modified_base 74: mod_base = OTHER; note = 2'-O-methyl modified nucleotide
  modified_base 75: mod_base = OTHER; note = 2'-O-methyl modified nucleotide
  modified_base 76: mod_base = OTHER; note = 2'-O-methyl modified nucleotide
  modified_base 77: mod_base = OTHER; note = 2'-O-methyl modified nucleotide
  modified_base 78: mod_base = OTHER; note = 2'-O-methyl modified nucleotide
  modified_base 79: mod_base = OTHER; note = 2'-O-methyl modified nucleotide
  modified_base 80: mod_base = OTHER; note = 2'-O-methyl modified nucleotide
  modified_base 81: mod_base = OTHER; note = 2'-O-methyl modified nucleotide
  modified_base 82: mod_base = OTHER; note = 2'-O-methyl modified nucleotide
  modified_base 83: mod_base = OTHER; note = 2'-O-methyl modified nucleotide
  modified_base 84: mod_base = OTHER; note = 2'-O-methyl modified nucleotide
  modified_base 85: mod_base = OTHER; note = 2'-O-methyl modified nucleotide
  modified_base 86: mod_base = OTHER; note = 2'-O-methyl modified nucleotide
  modified_base 87: mod_base = OTHER; note = 2'-O-methyl modified nucleotide
  modified_base 88: mod_base = OTHER; note = 2'-O-methyl modified nucleotide
  modified_base 89: mod_base = OTHER; note = 2'-O-methyl modified nucleotide
  modified_base 90: mod_base = OTHER; note = 2'-O-methyl modified nucleotide
  modified_base 91: mod_base = OTHER; note = 2'-O-methyl modified nucleotide
  modified_base 92: mod_base = OTHER; note = 2'-O-methyl modified nucleotide
  modified_base 93: mod_base = OTHER; note = 2'-O-methyl modified nucleotide
  modified_base 94: mod_base = OTHER; note = 2'-O-methyl modified nucleotide
  modified_base 95: mod_base = OTHER; note = 2'-O-methyl modified nucleotide
  modified_base 96: mod_base = OTHER; note = 2'-O-methyl modified nucleotide
  modified_base 97: mod_base = OTHER; note = 2'-O-methyl modified nucleotide with phosphorothioate linkage
  modified_base 98: mod_base = OTHER; note = 2'-O-methyl modified nucleotide with phosphorothioate linkage
  modified_base 99: mod_base = OTHER; note = 2'-O-methyl modified nucleotide with phosphorothioate linkage
  modified_base 100: mod_base = OTHER; note = 2'-O-methyl modified nucleotide

SEQ ID NO: 245 - RNA, 100 nt, synthetic construct; identical to SEQ ID NO: 39
  source 1..100: mol_type = other RNA; note = Description of Artificial Sequence: Synthetic polynucleotide
  modified_base 1: mod_base = OTHER; note = 2'-O-methyl modified nucleotide with phosphorothioate linkage
  modified_base 2: mod_base = OTHER; note = 2'-O-methyl modified nucleotide with phosphorothioate linkage
  modified_base 3: mod_base = OTHER; note = 2'-O-methyl modified nucleotide with phosphorothioate linkage
  modified_base 29: mod_base = OTHER; note = 2'-O-methyl modified nucleotide
  modified_base 30: mod_base = OTHER; note = 2'-O-methyl modified nucleotide
  modified_base 31: mod_base = OTHER; note = 2'-O-methyl modified nucleotide
  modified_base 32: mod_base = OTHER; note = 2'-O-methyl modified nucleotide
  modified_base 33: mod_base = OTHER; note = 2'-O-methyl modified nucleotide
  modified_base 34: mod_base = OTHER; note = 2'-O-methyl modified nucleotide
  modified_base 35: mod_base = OTHER; note = 2'-O-methyl modified nucleotide
  modified_base 36: mod_base = OTHER; note = 2'-O-methyl modified nucleotide
  modified_base 37: mod_base = OTHER; note = 2'-O-methyl modified nucleotide
  modified_base 38: mod_base = OTHER; note = 2'-O-methyl modified nucleotide
  modified_base 39: mod_base = OTHER; note = 2'-O-methyl modified nucleotide
  modified_base 40: mod_base = OTHER; note = 2'-O-methyl modified nucleotide
  modified_base 69: mod_base = OTHER; note = 2'-O-methyl modified nucleotide
  modified_base 70: mod_base = OTHER; note = 2'-O-methyl modified nucleotide
  modified_base 71: mod_base = OTHER; note = 2'-O-methyl modified nucleotide
  modified_base 72: mod_base = OTHER; note = 2'-O-methyl modified nucleotide
  modified_base 73: mod_base = OTHER; note = 2'-O-methyl modified nucleotide
  modified_base 74: mod_base = OTHER; note = 2'-O-methyl modified nucleotide
  modified_base 75: mod_base = OTHER; note = 2'-O-methyl modified nucleotide
  modified_base 76: mod_base = OTHER; note = 2'-O-methyl modified nucleotide
  modified_base 77: mod_base = OTHER; note = 2'-O-methyl modified nucleotide
  modified_base 78: mod_base = OTHER; note = 2'-O-methyl modified nucleotide
  modified_base 79: mod_base = OTHER; note = 2'-O-methyl modified nucleotide
  modified_base 80: mod_base = OTHER; note = 2'-O-methyl modified nucleotide
  modified_base 81: mod_base = OTHER; note = 2'-O-methyl modified nucleotide
  modified_base 82: mod_base = OTHER; note = 2'-O-methyl modified nucleotide
  modified_base 83: mod_base = OTHER; note = 2'-O-methyl modified nucleotide
  modified_base 84: mod_base = OTHER; note = 2'-O-methyl modified nucleotide
  modified_base 85: mod_base = OTHER; note = 2'-O-methyl modified nucleotide
  modified_base 86: mod_base = OTHER; note = 2'-O-methyl modified nucleotide
  modified_base 87: mod_base = OTHER; note = 2'-O-methyl modified nucleotide
  modified_base 88: mod_base = OTHER; note = 2'-O-methyl modified nucleotide
  modified_base 89: mod_base = OTHER; note = 2'-O-methyl modified nucleotide
  modified_base 90: mod_base = OTHER; note = 2'-O-methyl modified nucleotide
  modified_base 91: mod_base = OTHER; note = 2'-O-methyl modified nucleotide
  modified_base 92: mod_base = OTHER; note = 2'-O-methyl modified nucleotide
  modified_base 93: mod_base = OTHER; note = 2'-O-methyl modified nucleotide
  modified_base 94: mod_base = OTHER; note = 2'-O-methyl modified nucleotide
  modified_base 95: mod_base = OTHER; note = 2'-O-methyl modified nucleotide
  modified_base 96: mod_base = OTHER; note = 2'-O-methyl modified nucleotide
  modified_base 97: mod_base = OTHER; note = 2'-O-methyl modified nucleotide with phosphorothioate linkage
  modified_base 98: mod_base = OTHER; note = 2'-O-methyl modified nucleotide with phosphorothioate linkage
  modified_base 99: mod_base = OTHER; note = 2'-O-methyl modified nucleotide with phosphorothioate linkage
  modified_base 100: mod_base = OTHER; note = 2'-O-methyl modified nucleotide

SEQ ID NO: 246 - RNA, 100 nt, synthetic construct; identical to SEQ ID NO: 40
  source 1..100: mol_type = other RNA; note = Description of Artificial Sequence: Synthetic polynucleotide
  modified_base 1: mod_base = OTHER; note = 2'-O-methyl modified nucleotide with phosphorothioate linkage
  modified_base 2: mod_base = OTHER; note = 2'-O-methyl modified nucleotide with phosphorothioate linkage
  modified_base 3: mod_base = OTHER; note = 2'-O-methyl modified nucleotide with phosphorothioate linkage
  modified_base 29: mod_base = OTHER; note = 2'-O-methyl modified nucleotide
  modified_base 30: mod_base = OTHER; note = 2'-O-methyl modified nucleotide
  modified_base 31: mod_base = OTHER; note = 2'-O-methyl modified nucleotide
  modified_base 32: mod_base = OTHER; note = 2'-O-methyl modified nucleotide
  modified_base 33: mod_base = OTHER; note = 2'-O-methyl modified nucleotide
  modified_base 34: mod_base = OTHER; note = 2'-O-methyl modified nucleotide
  modified_base 35: mod_base = OTHER; note = 2'-O-methyl modified nucleotide
  modified_base 36: mod_base = OTHER; note = 2'-O-methyl modified nucleotide
  modified_base 37: mod_base = OTHER; note = 2'-O-methyl modified nucleotide
  modified_base 38: mod_base = OTHER; note = 2'-O-methyl modified nucleotide
  modified_base 39: mod_base = OTHER; note = 2'-O-methyl modified nucleotide
  modified_base 40: mod_base = OTHER; note = 2'-O-methyl modified nucleotide
  modified_base 69: mod_base = OTHER; note = 2'-O-methyl modified nucleotide
  modified_base 70: mod_base = OTHER; note = 2'-O-methyl modified nucleotide
  modified_base 71: mod_base = OTHER; note = 2'-O-methyl modified nucleotide
  modified_base 72: mod_base = OTHER; note = 2'-O-methyl modified nucleotide
  modified_base 73: mod_base = OTHER; note = 2'-O-methyl modified nucleotide
  modified_base 74: mod_base = OTHER; note = 2'-O-methyl modified nucleotide
  modified_base 75: mod_base = OTHER; note = 2'-O-methyl modified nucleotide
  modified_base 76: mod_base = OTHER; note = 2'-O-methyl modified nucleotide
  modified_base 77: mod_base = OTHER; note = 2'-O-methyl modified nucleotide
  modified_base 78: mod_base = OTHER; note = 2'-O-methyl modified nucleotide
  modified_base 79: mod_base = OTHER; note = 2'-O-methyl modified nucleotide
  modified_base 80: mod_base = OTHER; note = 2'-O-methyl modified nucleotide
  modified_base 81: mod_base = OTHER; note = 2'-O-methyl modified nucleotide
  modified_base 82: mod_base = OTHER; note = 2'-O-methyl modified nucleotide
  modified_base 83: mod_base = OTHER; note = 2'-O-methyl modified nucleotide
  modified_base 84: mod_base = OTHER; note = 2'-O-methyl modified nucleotide
  modified_base 85: mod_base = OTHER; note = 2'-O-methyl modified nucleotide
  modified_base 86: mod_base = OTHER; note = 2'-O-methyl modified nucleotide
  modified_base 87: mod_base = OTHER; note = 2'-O-methyl modified nucleotide
  modified_base 88: mod_base = OTHER; note = 2'-O-methyl modified nucleotide
  modified_base 89: mod_base = OTHER; note = 2'-O-methyl modified nucleotide
  modified_base 90: mod_base = OTHER; note = 2'-O-methyl modified nucleotide
  modified_base 91: mod_base = OTHER; note = 2'-O-methyl modified nucleotide
  modified_base 92: mod_base = OTHER; note = 2'-O-methyl modified nucleotide
  modified_base 93: mod_base = OTHER; note = 2'-O-methyl modified nucleotide
  modified_base 94: mod_base = OTHER; note = 2'-O-methyl modified nucleotide
  modified_base 95: mod_base = OTHER; note = 2'-O-methyl modified nucleotide
  modified_base 96: mod_base = OTHER; note = 2'-O-methyl modified nucleotide
  modified_base 97: mod_base = OTHER; note = 2'-O-methyl modified nucleotide with phosphorothioate linkage
  modified_base 98: mod_base = OTHER; note = 2'-O-methyl modified nucleotide with phosphorothioate linkage
  modified_base 99: mod_base = OTHER; note = 2'-O-methyl modified nucleotide with phosphorothioate linkage
  modified_base 100: mod_base = OTHER; note = 2'-O-methyl modified nucleotide

SEQ ID NO: 247 - RNA, 100 nt, synthetic construct; identical to SEQ ID NO: 41
  source 1..100: mol_type = other RNA; note = Description of Artificial Sequence: Synthetic polynucleotide
  modified_base 1: mod_base = OTHER; note = 2'-O-methyl modified nucleotide with phosphorothioate linkage
  modified_base 2: mod_base = OTHER; note = 2'-O-methyl modified nucleotide with phosphorothioate linkage
  modified_base 3: mod_base = OTHER; note = 2'-O-methyl modified nucleotide with phosphorothioate linkage
  modified_base 29: mod_base = OTHER; note = 2'-O-methyl modified nucleotide
  modified_base 30: mod_base = OTHER; note = 2'-O-methyl modified nucleotide
  modified_base 31: mod_base = OTHER; note = 2'-O-methyl modified nucleotide
  modified_base 32: mod_base = OTHER; note = 2'-O-methyl modified nucleotide
  modified_base 33: mod_base = OTHER; note = 2'-O-methyl modified nucleotide
  modified_base 34: mod_base = OTHER; note = 2'-O-methyl modified nucleotide
  modified_base 35: mod_base = OTHER; note = 2'-O-methyl modified nucleotide
  modified_base 36: mod_base = OTHER; note = 2'-O-methyl modified nucleotide
  modified_base 37: mod_base = OTHER; note = 2'-O-methyl modified nucleotide
  modified_base 38: mod_base = OTHER; note = 2'-O-methyl modified nucleotide
  modified_base 39: mod_base = OTHER; note = 2'-O-methyl modified nucleotide
  modified_base 40: mod_base = OTHER; note = 2'-O-methyl modified nucleotide
  modified_base 69: mod_base = OTHER; note = 2'-O-methyl modified nucleotide
  modified_base 70: mod_base = OTHER; note = 2'-O-methyl modified nucleotide
  modified_base 71: mod_base = OTHER; note = 2'-O-methyl modified nucleotide
  modified_base 72: mod_base = OTHER; note = 2'-O-methyl modified nucleotide
  modified_base 73: mod_base = OTHER; note = 2'-O-methyl modified nucleotide
  modified_base 74: mod_base = OTHER; note = 2'-O-methyl modified nucleotide
  modified_base 75: mod_base = OTHER; note = 2'-O-methyl modified nucleotide
  modified_base 76: mod_base = OTHER; note = 2'-O-methyl modified nucleotide
  modified_base 77: mod_base = OTHER; note = 2'-O-methyl modified nucleotide
  modified_base 78: mod_base = OTHER; note = 2'-O-methyl modified nucleotide
  modified_base 79: mod_base = OTHER; note = 2'-O-methyl modified nucleotide
  modified_base 80: mod_base = OTHER; note = 2'-O-methyl modified nucleotide
  modified_base 81: mod_base = OTHER; note = 2'-O-methyl modified nucleotide
  modified_base 82: mod_base = OTHER; note = 2'-O-methyl modified nucleotide
  modified_base 83: mod_base = OTHER; note = 2'-O-methyl modified nucleotide
  modified_base 84: mod_base = OTHER; note = 2'-O-methyl modified nucleotide
  modified_base 85: mod_base = OTHER; note = 2'-O-methyl modified nucleotide
  modified_base 86: mod_base = OTHER; note = 2'-O-methyl modified nucleotide
  modified_base 87: mod_base = OTHER; note = 2'-O-methyl modified nucleotide
  modified_base 88: mod_base = OTHER; note = 2'-O-methyl modified nucleotide
  modified_base 89: mod_base = OTHER; note = 2'-O-methyl modified nucleotide
  modified_base 90: mod_base = OTHER; note = 2'-O-methyl modified nucleotide
  modified_base 91: mod_base = OTHER; note = 2'-O-methyl modified nucleotide
  modified_base 92: mod_base = OTHER; note = 2'-O-methyl modified nucleotide
  modified_base 93: mod_base = OTHER; note = 2'-O-methyl modified nucleotide
  modified_base 94: mod_base = OTHER; note = 2'-O-methyl modified nucleotide
  modified_base 95: mod_base = OTHER; note = 2'-O-methyl modified nucleotide
  modified_base 96: mod_base = OTHER; note = 2'-O-methyl modified nucleotide
  modified_base 97: mod_base = OTHER; note = 2'-O-methyl modified nucleotide with phosphorothioate linkage
  modified_base 98: mod_base = OTHER; note = 2'-O-methyl modified nucleotide with phosphorothioate linkage
  modified_base 99: mod_base = OTHER; note = 2'-O-methyl modified nucleotide with phosphorothioate linkage
  modified_base 100: mod_base = OTHER; note = 2'-O-methyl modified nucleotide

SEQ ID NO: 248 - RNA, 100 nt, synthetic construct; identical to SEQ ID NO: 215
  source 1..100: mol_type = other RNA; note = Description of Artificial Sequence: Synthetic polynucleotide
  modified_base 1: mod_base = OTHER; note = 2'-O-methyl modified nucleotide with phosphorothioate linkage
  modified_base 2: mod_base = OTHER; note = 2'-O-methyl modified nucleotide with phosphorothioate linkage
  modified_base 3: mod_base = OTHER; note = 2'-O-methyl modified nucleotide with phosphorothioate linkage
  modified_base 29: mod_base = OTHER; note = 2'-O-methyl modified nucleotide
  modified_base 30: mod_base = OTHER; note = 2'-O-methyl modified nucleotide
  modified_base 31: mod_base = OTHER; note = 2'-O-methyl modified nucleotide
  modified_base 32: mod_base = OTHER; note = 2'-O-methyl modified nucleotide
  modified_base 33: mod_base = OTHER; note = 2'-O-methyl modified nucleotide
  modified_base 34: mod_base = OTHER; note = 2'-O-methyl modified nucleotide
  modified_base 35: mod_base = OTHER; note = 2'-O-methyl modified nucleotide
  modified_base 36: mod_base = OTHER; note = 2'-O-methyl modified nucleotide
  modified_base 37: mod_base = OTHER; note = 2'-O-methyl modified nucleotide
  modified_base 38: mod_base = OTHER; note = 2'-O-methyl modified nucleotide
  modified_base 39: mod_base = OTHER; note = 2'-O-methyl modified nucleotide
  modified_base 40: mod_base = OTHER; note = 2'-O-methyl modified nucleotide
  modified_base 69: mod_base = OTHER; note = 2'-O-methyl modified nucleotide
  modified_base 70: mod_base = OTHER; note = 2'-O-methyl modified nucleotide
  modified_base 71: mod_base = OTHER; note = 2'-O-methyl modified nucleotide
  modified_base 72: mod_base = OTHER; note = 2'-O-methyl modified nucleotide
  modified_base 73: mod_base = OTHER; note = 2'-O-methyl modified nucleotide
  modified_base 74: mod_base = OTHER; note = 2'-O-methyl modified nucleotide
  modified_base 75: mod_base = OTHER; note = 2'-O-methyl modified nucleotide
  modified_base 76: mod_base = OTHER; note = 2'-O-methyl modified nucleotide
  modified_base 77: mod_base = OTHER; note = 2'-O-methyl modified nucleotide
  modified_base 78: mod_base = OTHER; note = 2'-O-methyl modified nucleotide
  modified_base 79: mod_base = OTHER; note = 2'-O-methyl modified nucleotide
  modified_base 80: mod_base = OTHER; note = 2'-O-methyl modified nucleotide
  modified_base 81: mod_base = OTHER; note = 2'-O-methyl modified nucleotide
  modified_base 82: mod_base = OTHER; note = 2'-O-methyl modified nucleotide
  modified_base 83: mod_base = OTHER; note = 2'-O-methyl modified nucleotide
  modified_base 84: mod_base = OTHER; note = 2'-O-methyl modified nucleotide
  modified_base 85: mod_base = OTHER; note = 2'-O-methyl modified nucleotide
  modified_base 86: mod_base = OTHER; note = 2'-O-methyl modified nucleotide
  modified_base 87: mod_base = OTHER; note = 2'-O-methyl modified nucleotide
  modified_base 88: mod_base = OTHER; note = 2'-O-methyl modified nucleotide
  modified_base 89: mod_base = OTHER; note = 2'-O-methyl modified nucleotide
  modified_base 90: mod_base = OTHER; note = 2'-O-methyl modified nucleotide
  modified_base 91: mod_base = OTHER; note = 2'-O-methyl modified nucleotide
  modified_base 92: mod_base = OTHER; note = 2'-O-methyl modified nucleotide
  modified_base 93: mod_base = OTHER; note = 2'-O-methyl modified nucleotide
  modified_base 94: mod_base = OTHER; note = 2'-O-methyl modified nucleotide
  modified_base 95: mod_base = OTHER; note = 2'-O-methyl modified nucleotide
  modified_base 96: mod_base = OTHER; note = 2'-O-methyl modified nucleotide
  modified_base 97: mod_base = OTHER; note = 2'-O-methyl modified nucleotide with phosphorothioate linkage
  modified_base 98: mod_base = OTHER; note = 2'-O-methyl modified nucleotide with phosphorothioate linkage
  modified_base 99: mod_base = OTHER; note = 2'-O-methyl modified nucleotide with phosphorothioate linkage
  modified_base 100: mod_base = OTHER; note = 2'-O-methyl modified nucleotide

SEQ ID NO: 249 - RNA, 100 nt, synthetic construct; identical to SEQ ID NO: 216
  source 1..100: mol_type = other RNA; note = Description of Artificial Sequence: Synthetic polynucleotide
  modified_base 1: mod_base = OTHER; note = 2'-O-methyl modified nucleotide with phosphorothioate linkage
  modified_base 2: mod_base = OTHER; note = 2'-O-methyl modified nucleotide with phosphorothioate linkage
  modified_base 3: mod_base = OTHER; note = 2'-O-methyl modified nucleotide with phosphorothioate linkage
  modified_base 29: mod_base = OTHER; note = 2'-O-methyl modified nucleotide
  modified_base 30: mod_base = OTHER; note = 2'-O-methyl modified nucleotide
  modified_base 31: mod_base = OTHER; note = 2'-O-methyl modified nucleotide
  modified_base 32: mod_base = OTHER; note = 2'-O-methyl modified nucleotide
  modified_base 33: mod_base = OTHER; note = 2'-O-methyl modified nucleotide
  modified_base 34: mod_base = OTHER; note = 2'-O-methyl modified nucleotide
  modified_base 35: mod_base = OTHER; note = 2'-O-methyl modified nucleotide
  modified_base 36: mod_base = OTHER; note = 2'-O-methyl modified nucleotide
  modified_base 37: mod_base = OTHER; note = 2'-O-methyl modified nucleotide
  modified_base 38: mod_base = OTHER; note = 2'-O-methyl modified nucleotide
  modified_base 39: mod_base = OTHER; note = 2'-O-methyl modified nucleotide
  modified_base 40: mod_base = OTHER; note = 2'-O-methyl modified nucleotide
  modified_base 69: mod_base = OTHER; note = 2'-O-methyl modified nucleotide
  modified_base 70: mod_base = OTHER; note = 2'-O-methyl modified nucleotide
  modified_base 71: mod_base = OTHER; note = 2'-O-methyl modified nucleotide
  modified_base 72: mod_base = OTHER; note = 2'-O-methyl modified nucleotide
  modified_base 73: mod_base = OTHER; note = 2'-O-methyl modified nucleotide
  modified_base 74: mod_base = OTHER; note = 2'-O-methyl modified nucleotide
  modified_base 75: mod_base = OTHER; note = 2'-O-methyl modified nucleotide
  modified_base 76: mod_base = OTHER; note = 2'-O-methyl modified nucleotide
  modified_base 77: mod_base = OTHER; note = 2'-O-methyl modified nucleotide
  modified_base 78: mod_base = OTHER; note = 2'-O-methyl modified nucleotide
  modified_base 79: mod_base = OTHER; note = 2'-O-methyl modified nucleotide
  modified_base 80: mod_base = OTHER; note = 2'-O-methyl modified nucleotide
  modified_base 81: mod_base = OTHER; note = 2'-O-methyl modified nucleotide
  modified_base 82: mod_base = OTHER; note = 2'-O-methyl modified nucleotide
  modified_base 83: mod_base = OTHER; note = 2'-O-methyl modified nucleotide
  modified_base 84: mod_base = OTHER; note = 2'-O-methyl modified nucleotide
  modified_base 85: mod_base = OTHER; note = 2'-O-methyl modified nucleotide
  modified_base 86: mod_base = OTHER; note = 2'-O-methyl modified nucleotide
  modified_base 87: mod_base = OTHER; note = 2'-O-methyl modified nucleotide
  modified_base 88: mod_base = OTHER; note = 2'-O-methyl modified nucleotide
  modified_base 89: mod_base = OTHER; note = 2'-O-methyl modified nucleotide
  modified_base 90: mod_base = OTHER; note = 2'-O-methyl modified nucleotide
  modified_base 91: mod_base = OTHER; note = 2'-O-methyl modified nucleotide
  modified_base 92: mod_base = OTHER; note = 2'-O-methyl modified nucleotide
  modified_base 93: mod_base = OTHER; note = 2'-O-methyl modified nucleotide
  modified_base 94: mod_base = OTHER; note = 2'-O-methyl modified nucleotide
  modified_base 95: mod_base = OTHER; note = 2'-O-methyl modified nucleotide
  modified_base 96: mod_base = OTHER; note = 2'-O-methyl modified nucleotide
  modified_base 97: mod_base = OTHER; note = 2'-O-methyl modified nucleotide with phosphorothioate linkage
  modified_base 98: mod_base = OTHER; note = 2'-O-methyl modified nucleotide with phosphorothioate linkage
  modified_base 99: mod_base = OTHER; note = 2'-O-methyl modified nucleotide with phosphorothioate linkage
  modified_base 100: mod_base = OTHER; note = 2'-O-methyl modified nucleotide

SEQ ID NO: 250 - RNA, 100 nt, synthetic construct; identical to SEQ ID NO: 217
  source 1..100: mol_type = other RNA; note = Description of Artificial Sequence: Synthetic polynucleotide
  modified_base 1: mod_base = OTHER; note = 2'-O-methyl modified nucleotide with phosphorothioate linkage
  modified_base 2: mod_base = OTHER; note = 2'-O-methyl modified nucleotide with phosphorothioate linkage
  modified_base 3: mod_base = OTHER; note = 2'-O-methyl modified nucleotide with phosphorothioate linkage
  modified_base 29: mod_base = OTHER; note = 2'-O-methyl modified nucleotide
  modified_base 30: mod_base = OTHER; note = 2'-O-methyl modified nucleotide
  modified_base 31: mod_base = OTHER; note = 2'-O-methyl modified nucleotide
  modified_base 32: mod_base = OTHER; note = 2'-O-methyl modified nucleotide
  modified_base 33: mod_base = OTHER; note = 2'-O-methyl modified nucleotide
  modified_base 34: mod_base = OTHER; note = 2'-O-methyl modified nucleotide
  modified_base 35: mod_base = OTHER; note = 2'-O-methyl modified nucleotide
  modified_base 36: mod_base = OTHER; note = 2'-O-methyl modified nucleotide
  modified_base 37: mod_base = OTHER; note = 2'-O-methyl modified nucleotide
  modified_base 38: mod_base = OTHER; note = 2'-O-methyl modified nucleotide
  modified_base 39: mod_base = OTHER; note = 2'-O-methyl modified nucleotide
  modified_base 40: mod_base = OTHER; note = 2'-O-methyl modified nucleotide
  modified_base 69: mod_base = OTHER; note = 2'-O-methyl modified nucleotide
  modified_base 70: mod_base = OTHER; note = 2'-O-methyl modified nucleotide
  modified_base 71: mod_base = OTHER; note = 2'-O-methyl modified nucleotide
  modified_base 72: mod_base = OTHER; note = 2'-O-methyl modified nucleotide
  modified_base 73: mod_base = OTHER; note = 2'-O-methyl modified nucleotide
  modified_base 74: mod_base = OTHER; note = 2'-O-methyl modified nucleotide
  modified_base 75: mod_base = OTHER; note = 2'-O-methyl modified nucleotide
  modified_base 76: mod_base = OTHER; note = 2'-O-methyl modified nucleotide
  modified_base 77: mod_base = OTHER; note = 2'-O-methyl modified nucleotide
  modified_base 78: mod_base = OTHER; note = 2'-O-methyl modified nucleotide
  modified_base 79: mod_base = OTHER; note = 2'-O-methyl modified nucleotide
  modified_base 80: mod_base = OTHER; note = 2'-O-methyl modified nucleotide
  modified_base 81: mod_base = OTHER; note = 2'-O-methyl modified nucleotide
  modified_base 82: mod_base = OTHER; note = 2'-O-methyl modified nucleotide
  modified_base 83: mod_base = OTHER; note = 2'-O-methyl modified nucleotide
  modified_base 84: mod_base = OTHER; note = 2'-O-methyl modified nucleotide
  modified_base 85: mod_base = OTHER; note = 2'-O-methyl modified nucleotide
  modified_base 86: mod_base = OTHER; note = 2'-O-methyl modified nucleotide
  modified_base 87: mod_base = OTHER; note = 2'-O-methyl modified nucleotide
  modified_base 88: mod_base = OTHER; note = 2'-O-methyl modified nucleotide
  modified_base 89: mod_base = OTHER; note = 2'-O-methyl modified nucleotide
  modified_base 90: mod_base = OTHER; note = 2'-O-methyl modified nucleotide
  modified_base 91: mod_base = OTHER; note = 2'-O-methyl modified nucleotide
  modified_base 92: mod_base = OTHER; note = 2'-O-methyl modified nucleotide
  modified_base 93: mod_base = OTHER; note = 2'-O-methyl modified nucleotide
  modified_base 94: mod_base = OTHER; note = 2'-O-methyl modified nucleotide
  modified_base 95: mod_base = OTHER; note = 2'-O-methyl modified nucleotide
  modified_base 96: mod_base = OTHER; note = 2'-O-methyl modified nucleotide
  modified_base 97: mod_base = OTHER; note = 2'-O-methyl modified nucleotide with phosphorothioate linkage
  modified_base 98: mod_base = OTHER; note = 2'-O-methyl modified nucleotide with phosphorothioate linkage
  modified_base 99: mod_base = OTHER; note = 2'-O-methyl modified nucleotide with phosphorothioate linkage
  modified_base 100: mod_base = OTHER; note = 2'-O-methyl modified nucleotide

SEQ ID NO: 251 - RNA, 100 nt, synthetic construct; identical to SEQ ID NO: 218
  source 1..100: mol_type = other RNA; note = Description of Artificial Sequence: Synthetic polynucleotide
  modified_base 1: mod_base = OTHER; note = 2'-O-methyl modified nucleotide with phosphorothioate linkage
  modified_base 2: mod_base = OTHER; note = 2'-O-methyl modified nucleotide with phosphorothioate linkage
  modified_base 3: mod_base = OTHER; note = 2'-O-methyl modified nucleotide with phosphorothioate linkage
  modified_base 29: mod_base = OTHER; note = 2'-O-methyl modified nucleotide
  modified_base 30: mod_base = OTHER; note = 2'-O-methyl modified nucleotide
  modified_base 31: mod_base = OTHER; note = 2'-O-methyl modified nucleotide
  modified_base 32: mod_base = OTHER; note = 2'-O-methyl modified nucleotide
  modified_base 33: mod_base = OTHER; note = 2'-O-methyl modified nucleotide
  modified_base 34: mod_base = OTHER; note = 2'-O-methyl modified nucleotide
  modified_base 35: mod_base = OTHER; note = 2'-O-methyl modified nucleotide
  modified_base 36: mod_base = OTHER; note = 2'-O-methyl modified nucleotide
  modified_base 37: mod_base = OTHER; note = 2'-O-methyl modified nucleotide
  modified_base 38: mod_base = OTHER; note = 2'-O-methyl modified nucleotide
  modified_base 39: mod_base = OTHER; note = 2'-O-methyl modified nucleotide
  modified_base 40: mod_base = OTHER; note = 2'-O-methyl modified nucleotide
  modified_base 69: mod_base = OTHER; note = 2'-O-methyl modified nucleotide
  modified_base 70: mod_base = OTHER; note = 2'-O-methyl modified nucleotide
  modified_base 71: mod_base = OTHER; note = 2'-O-methyl modified nucleotide
  modified_base 72: mod_base = OTHER; note = 2'-O-methyl modified nucleotide
  modified_base 73: mod_base = OTHER; note = 2'-O-methyl modified nucleotide
  modified_base 74: mod_base = OTHER; note = 2'-O-methyl modified nucleotide
  modified_base 75: mod_base = OTHER; note = 2'-O-methyl modified nucleotide
  modified_base 76: mod_base = OTHER; note = 2'-O-methyl modified nucleotide
  modified_base 77: mod_base = OTHER; note = 2'-O-methyl modified nucleotide
  modified_base 78: mod_base = OTHER; note = 2'-O-methyl modified nucleotide
  modified_base 79: mod_base = OTHER; note = 2'-O-methyl modified nucleotide
  modified_base 80: mod_base = OTHER; note = 2'-O-methyl modified nucleotide
  modified_base 81: mod_base = OTHER; note = 2'-O-methyl modified nucleotide
  modified_base 82: mod_base = OTHER; note = 2'-O-methyl modified nucleotide
  modified_base 83: mod_base = OTHER; note = 2'-O-methyl modified nucleotide
  modified_base 84: mod_base = OTHER; note = 2'-O-methyl modified nucleotide
  modified_base 85: mod_base = OTHER; note = 2'-O-methyl modified nucleotide
  modified_base 86: mod_base = OTHER; note = 2'-O-methyl modified nucleotide
  modified_base 87: mod_base = OTHER; note = 2'-O-methyl modified nucleotide
  modified_base 88: mod_base = OTHER; note = 2'-O-methyl modified nucleotide
  modified_base 89: mod_base = OTHER; note = 2'-O-methyl modified nucleotide
  modified_base 90: mod_base = OTHER; note = 2'-O-methyl modified nucleotide
  modified_base 91: mod_base = OTHER; note = 2'-O-methyl modified nucleotide
  modified_base 92: mod_base = OTHER; note = 2'-O-methyl modified nucleotide
  modified_base 93: mod_base = OTHER; note = 2'-O-methyl modified nucleotide
  modified_base 94: mod_base = OTHER; note = 2'-O-methyl modified nucleotide
  modified_base 95: mod_base = OTHER; note = 2'-O-methyl modified nucleotide
  modified_base 96: mod_base = OTHER; note = 2'-O-methyl modified nucleotide
  modified_base 97: mod_base = OTHER; note = 2'-O-methyl modified nucleotide with phosphorothioate linkage
  modified_base 98: mod_base = OTHER; note = 2'-O-methyl modified nucleotide with phosphorothioate linkage
  modified_base 99: mod_base = OTHER; note = 2'-O-methyl modified nucleotide with phosphorothioate linkage
  modified_base 100: mod_base = OTHER; note = 2'-O-methyl modified nucleotide

SEQ ID NO: 252 - RNA, 100 nt, synthetic construct; identical to SEQ ID NO: 42
  source 1..100: mol_type = other RNA; note = Description of Artificial Sequence: Synthetic polynucleotide
  modified_base 1: mod_base = OTHER; note = 2'-O-methyl modified nucleotide with phosphorothioate linkage
  modified_base 2: mod_base = OTHER; note = 2'-O-methyl modified nucleotide with phosphorothioate linkage
  modified_base 3: mod_base = OTHER; note = 2'-O-methyl modified nucleotide with phosphorothioate linkage
  modified_base 29: mod_base = OTHER; note = 2'-O-methyl modified nucleotide
  modified_base 30: mod_base = OTHER; note = 2'-O-methyl modified nucleotide
  modified_base 31: mod_base = OTHER; note = 2'-O-methyl modified nucleotide
  modified_base 32: mod_base = OTHER; note = 2'-O-methyl modified nucleotide
  modified_base 33: mod_base = OTHER; note = 2'-O-methyl modified nucleotide
  modified_base 34: mod_base = OTHER; note = 2'-O-methyl modified nucleotide
  modified_base 35: mod_base = OTHER; note = 2'-O-methyl modified nucleotide
  modified_base 36: mod_base = OTHER; note = 2'-O-methyl modified nucleotide
  modified_base 37: mod_base = OTHER; note = 2'-O-methyl modified nucleotide
  modified_base 38: mod_base = OTHER; note = 2'-O-methyl modified nucleotide
  modified_base 39: mod_base = OTHER; note = 2'-O-methyl modified nucleotide
  modified_base 40: mod_base = OTHER; note = 2'-O-methyl modified nucleotide
  modified_base 69: mod_base = OTHER; note = 2'-O-methyl modified nucleotide
  modified_base 70: mod_base = OTHER; note = 2'-O-methyl modified nucleotide
  modified_base 71: mod_base = OTHER; note = 2'-O-methyl modified nucleotide
  modified_base 72: mod_base = OTHER; note = 2'-O-methyl modified nucleotide
  modified_base 73: mod_base = OTHER; note = 2'-O-methyl modified nucleotide
  modified_base 74: mod_base = OTHER; note = 2'-O-methyl modified nucleotide
  modified_base 75: mod_base = OTHER; note = 2'-O-methyl modified nucleotide
  modified_base 76: mod_base = OTHER; note = 2'-O-methyl modified nucleotide
  modified_base 77: mod_base = OTHER; note = 2'-O-methyl modified nucleotide
  modified_base 78: mod_base = OTHER; note = 2'-O-methyl modified nucleotide
  modified_base 79: mod_base = OTHER; note = 2'-O-methyl modified nucleotide
  modified_base 80: mod_base = OTHER; note = 2'-O-methyl modified nucleotide
  modified_base 81: mod_base = OTHER; note = 2'-O-methyl modified nucleotide
  modified_base 82: mod_base = OTHER; note = 2'-O-methyl modified nucleotide
  modified_base 83: mod_base = OTHER; note = 2'-O-methyl modified nucleotide
  modified_base 84: mod_base = OTHER; note = 2'-O-methyl modified nucleotide
  modified_base 85: mod_base = OTHER; note = 2'-O-methyl modified nucleotide
  modified_base 86: mod_base = OTHER; note = 2'-O-methyl modified nucleotide
  modified_base 87: mod_base = OTHER; note = 2'-O-methyl modified nucleotide
  modified_base 88: mod_base = OTHER; note = 2'-O-methyl modified nucleotide
  modified_base 89: mod_base = OTHER; note = 2'-O-methyl modified nucleotide
  modified_base 90: mod_base = OTHER; note = 2'-O-methyl modified nucleotide
  modified_base 91: mod_base = OTHER; note = 2'-O-methyl modified nucleotide
  modified_base 92: mod_base = OTHER; note = 2'-O-methyl modified nucleotide
  modified_base 93: mod_base = OTHER; note = 2'-O-methyl modified nucleotide
  modified_base 94: mod_base = OTHER; note = 2'-O-methyl modified nucleotide
  modified_base 95: mod_base = OTHER; note = 2'-O-methyl modified nucleotide
  modified_base 96: mod_base = OTHER; note = 2'-O-methyl modified nucleotide
  modified_base 97: mod_base = OTHER; note = 2'-O-methyl modified nucleotide with phosphorothioate linkage
  modified_base 98: mod_base = OTHER; note = 2'-O-methyl modified nucleotide with phosphorothioate linkage
  modified_base 99: mod_base = OTHER; note = 2'-O-methyl modified nucleotide with phosphorothioate linkage
  modified_base 100: mod_base = OTHER; note = 2'-O-methyl modified nucleotide

SEQ ID NO: 253 - RNA, 100 nt, synthetic construct; identical to SEQ ID NO: 43
  source 1..100: mol_type = other RNA; note = Description of Artificial Sequence: Synthetic polynucleotide
  modified_base 1: mod_base = OTHER; note = 2'-O-methyl modified nucleotide with phosphorothioate linkage
  modified_base 2: mod_base = OTHER; note = 2'-O-methyl modified nucleotide with phosphorothioate linkage
  modified_base 3: mod_base = OTHER; note = 2'-O-methyl modified nucleotide with phosphorothioate linkage
  modified_base 29: mod_base = OTHER; note = 2'-O-methyl modified nucleotide
  modified_base 30: mod_base = OTHER; note = 2'-O-methyl modified nucleotide
  modified_base 31: mod_base = OTHER; note = 2'-O-methyl modified nucleotide
  modified_base 32: mod_base = OTHER; note = 2'-O-methyl modified nucleotide
  modified_base 33: mod_base = OTHER; note = 2'-O-methyl modified nucleotide
  modified_base 34: mod_base = OTHER; note = 2'-O-methyl modified nucleotide
  modified_base 35: mod_base = OTHER; note = 2'-O-methyl modified nucleotide
  modified_base 36: mod_base = OTHER; note = 2'-O-methyl modified nucleotide
  modified_base 37: mod_base = OTHER; note = 2'-O-methyl modified nucleotide
  modified_base 38: mod_base = OTHER; note = 2'-O-methyl modified nucleotide
  modified_base 39: mod_base = OTHER; note = 2'-O-methyl modified nucleotide
  modified_base 40: mod_base = OTHER; note = 2'-O-methyl modified nucleotide
  modified_base 69: mod_base = OTHER; note = 2'-O-methyl modified nucleotide
  modified_base 70: mod_base = OTHER; note = 2'-O-methyl modified nucleotide
  modified_base 71: mod_base = OTHER; note = 2'-O-methyl modified nucleotide
  modified_base 72: mod_base = OTHER; note = 2'-O-methyl modified nucleotide
  modified_base 73: mod_base = OTHER; note = 2'-O-methyl modified nucleotide
  modified_base 74: mod_base = OTHER; note = 2'-O-methyl modified nucleotide
  modified_base 75: mod_base = OTHER; note = 2'-O-methyl modified nucleotide
  modified_base 76: mod_base = OTHER; note = 2'-O-methyl modified nucleotide
  modified_base 77: mod_base = OTHER; note = 2'-O-methyl modified nucleotide
  modified_base 78: mod_base = OTHER; note = 2'-O-methyl modified nucleotide
  modified_base 79: mod_base = OTHER; note = 2'-O-methyl modified nucleotide
  modified_base 80: mod_base = OTHER; note = 2'-O-methyl modified nucleotide
  modified_base 81: mod_base = OTHER; note = 2'-O-methyl modified nucleotide
  modified_base 82: mod_base = OTHER; note = 2'-O-methyl modified nucleotide
  modified_base 83: mod_base = OTHER; note = 2'-O-methyl modified nucleotide
  modified_base 84: mod_base = OTHER; note = 2'-O-methyl modified nucleotide
  modified_base 85: mod_base = OTHER; note = 2'-O-methyl modified nucleotide
  modified_base 86: mod_base = OTHER; note = 2'-O-methyl modified nucleotide
  modified_base 87: mod_base = OTHER; note = 2'-O-methyl modified nucleotide
  modified_base 88: mod_base = OTHER; note = 2'-O-methyl modified nucleotide
  modified_base 89: mod_base = OTHER; note = 2'-O-methyl modified nucleotide
  modified_base 90: mod_base = OTHER; note = 2'-O-methyl modified nucleotide
  modified_base 91: mod_base = OTHER; note = 2'-O-methyl modified nucleotide
  modified_base 92: mod_base = OTHER; note = 2'-O-methyl modified nucleotide
  modified_base 93: mod_base = OTHER; note = 2'-O-methyl modified nucleotide
  modified_base 94: mod_base = OTHER; note = 2'-O-methyl modified nucleotide
  modified_base 95: mod_base = OTHER; note = 2'-O-methyl modified nucleotide
  modified_base 96: mod_base = OTHER; note = 2'-O-methyl modified nucleotide
  modified_base 97: mod_base = OTHER; note = 2'-O-methyl modified nucleotide with phosphorothioate linkage
  modified_base 98: mod_base = OTHER; note = 2'-O-methyl modified nucleotide with phosphorothioate linkage
  modified_base 99: mod_base = OTHER; note = 2'-O-methyl modified nucleotide with phosphorothioate linkage
  modified_base 100: mod_base = OTHER; note = 2'-O-methyl modified nucleotide

SEQ ID NO: 254 - RNA, 100 nt, synthetic construct; identical to SEQ ID NO: 44
  source 1..100: mol_type = other RNA; note = Description of Artificial Sequence: Synthetic polynucleotide
  modified_base 1: mod_base = OTHER; note = 2'-O-methyl modified nucleotide with phosphorothioate linkage
  modified_base 2: mod_base = OTHER; note = 2'-O-methyl modified nucleotide with phosphorothioate linkage
  modified_base 3: mod_base = OTHER; note = 2'-O-methyl modified nucleotide with phosphorothioate linkage
  modified_base 29: mod_base = OTHER; note = 2'-O-methyl modified nucleotide
  modified_base 30: mod_base = OTHER; note = 2'-O-methyl modified nucleotide
  modified_base 31: mod_base = OTHER; note = 2'-O-methyl modified nucleotide
  modified_base 32: mod_base = OTHER; note = 2'-O-methyl modified nucleotide
  modified_base 33: mod_base = OTHER; note = 2'-O-methyl modified nucleotide
  modified_base 34: mod_base = OTHER; note = 2'-O-methyl modified nucleotide
  modified_base 35: mod_base = OTHER; note = 2'-O-methyl modified nucleotide
  modified_base 36: mod_base = OTHER; note = 2'-O-methyl modified nucleotide
  modified_base 37: mod_base = OTHER; note = 2'-O-methyl modified nucleotide
  modified_base 38: mod_base = OTHER; note = 2'-O-methyl modified nucleotide
  modified_base 39: mod_base = OTHER; note = 2'-O-methyl modified nucleotide
  modified_base 40: mod_base = OTHER; note = 2'-O-methyl modified nucleotide
  modified_base 69: mod_base = OTHER; note = 2'-O-methyl modified nucleotide
  modified_base 70: mod_base = OTHER; note = 2'-O-methyl modified nucleotide
  modified_base 71: mod_base = OTHER; note = 2'-O-methyl modified nucleotide
  modified_base 72: mod_base = OTHER; note = 2'-O-methyl modified nucleotide
  modified_base 73: mod_base = OTHER; note = 2'-O-methyl modified nucleotide
  modified_base 74: mod_base = OTHER; note = 2'-O-methyl modified nucleotide
  modified_base 75: mod_base = OTHER; note = 2'-O-methyl modified nucleotide
  modified_base 76: mod_base = OTHER; note = 2'-O-methyl modified nucleotide
  modified_base 77: mod_base = OTHER; note = 2'-O-methyl modified nucleotide
  modified_base 78: mod_base = OTHER; note = 2'-O-methyl modified nucleotide
  modified_base 79: mod_base = OTHER; note = 2'-O-methyl modified nucleotide
  modified_base 80: mod_base = OTHER; note = 2'-O-methyl modified nucleotide
  modified_base 81: mod_base = OTHER; note = 2'-O-methyl modified nucleotide
  modified_base 82: mod_base = OTHER; note = 2'-O-methyl modified nucleotide
  modified_base 83: mod_base = OTHER; note = 2'-O-methyl modified nucleotide
  modified_base 84: mod_base = OTHER; note = 2'-O-methyl modified nucleotide
  modified_base 85: mod_base = OTHER; note = 2'-O-methyl modified nucleotide
  modified_base 86: mod_base = OTHER; note = 2'-O-methyl modified nucleotide
  modified_base 87: mod_base = OTHER; note = 2'-O-methyl modified nucleotide
  modified_base 88: mod_base = OTHER; note = 2'-O-methyl modified nucleotide
  modified_base 89: mod_base = OTHER; note = 2'-O-methyl modified nucleotide
  modified_base 90: mod_base = OTHER; note = 2'-O-methyl modified nucleotide
  modified_base 91: mod_base = OTHER; note = 2'-O-methyl modified nucleotide
  modified_base 92: mod_base = OTHER; note = 2'-O-methyl modified nucleotide
  modified_base 93: mod_base = OTHER; note = 2'-O-methyl modified nucleotide
  modified_base 94: mod_base = OTHER; note = 2'-O-methyl modified nucleotide
  modified_base 95: mod_base = OTHER; note = 2'-O-methyl modified nucleotide
  modified_base 96: mod_base = OTHER; note = 2'-O-methyl modified nucleotide
  modified_base 97: mod_base = OTHER; note = 2'-O-methyl modified nucleotide with phosphorothioate linkage
  modified_base 98: mod_base = OTHER; note = 2'-O-methyl modified nucleotide with phosphorothioate linkage
  modified_base 99: mod_base = OTHER; note = 2'-O-methyl modified nucleotide with phosphorothioate linkage
  modified_base 100: mod_base = OTHER; note = 2'-O-methyl modified nucleotide

SEQ ID NO: 255 - RNA, 100 nt, synthetic construct; identical to SEQ ID NO: 222
  source 1..100: mol_type = other RNA; note = Description of Artificial Sequence: Synthetic polynucleotide
  modified_base 1: mod_base = OTHER; note = 2'-O-methyl modified nucleotide with phosphorothioate linkage
  modified_base 2: mod_base = OTHER; note = 2'-O-methyl modified nucleotide with phosphorothioate linkage
  modified_base 3: mod_base = OTHER; note = 2'-O-methyl modified nucleotide with phosphorothioate linkage
  modified_base 29: mod_base = OTHER; note = 2'-O-methyl modified nucleotide
  modified_base 30: mod_base = OTHER; note = 2'-O-methyl modified nucleotide
  modified_base 31: mod_base = OTHER; note = 2'-O-methyl modified nucleotide
  modified_base 32: mod_base = OTHER; note = 2'-O-methyl modified nucleotide
  modified_base 33: mod_base = OTHER; note = 2'-O-methyl modified nucleotide
  modified_base 34: mod_base = OTHER; note = 2'-O-methyl modified nucleotide
  modified_base 35: mod_base = OTHER; note = 2'-O-methyl modified nucleotide
  modified_base 36: mod_base = OTHER; note = 2'-O-methyl modified nucleotide
  modified_base 37: mod_base = OTHER; note = 2'-O-methyl modified nucleotide
  modified_base 38: mod_base = OTHER; note = 2'-O-methyl modified nucleotide
  modified_base 39: mod_base = OTHER; note = 2'-O-methyl modified nucleotide
  modified_base 40: mod_base = OTHER; note = 2'-O-methyl modified nucleotide
  modified_base 69: mod_base = OTHER; note = 2'-O-methyl modified nucleotide
  modified_base 70: mod_base = OTHER; note = 2'-O-methyl modified nucleotide
  modified_base 71: mod_base = OTHER; note = 2'-O-methyl modified nucleotide
  modified_base 72: mod_base = OTHER; note = 2'-O-methyl modified nucleotide
  modified_base 73: mod_base = OTHER; note = 2'-O-methyl modified nucleotide
  modified_base 74: mod_base = OTHER; note = 2'-O-methyl modified nucleotide
  modified_base 75: mod_base = OTHER; note = 2'-O-methyl modified nucleotide
  modified_base 76: mod_base = OTHER; note = 2'-O-methyl modified nucleotide
  modified_base 77: mod_base = OTHER; note = 2'-O-methyl modified nucleotide
  modified_base 78: mod_base = OTHER; note = 2'-O-methyl modified nucleotide
  modified_base 79: mod_base = OTHER; note = 2'-O-methyl modified nucleotide
  modified_base 80: mod_base = OTHER; note = 2'-O-methyl modified nucleotide
  modified_base 81: mod_base = OTHER; note = 2'-O-methyl modified nucleotide
  modified_base 82: mod_base = OTHER; note = 2'-O-methyl modified nucleotide
  modified_base 83: mod_base = OTHER; note = 2'-O-methyl modified nucleotide
  modified_base 84: mod_base = OTHER; note = 2'-O-methyl modified nucleotide
  modified_base 85: mod_base = OTHER; note = 2'-O-methyl modified nucleotide
  modified_base 86: mod_base = OTHER; note = 2'-O-methyl modified nucleotide
  modified_base 87: mod_base = OTHER; note = 2'-O-methyl modified nucleotide
  modified_base 88: mod_base = OTHER; note = 2'-O-methyl modified nucleotide
  modified_base 89: mod_base = OTHER; note = 2'-O-methyl modified nucleotide
  modified_base 90: mod_base = OTHER; note = 2'-O-methyl modified nucleotide
  modified_base 91: mod_base = OTHER; note = 2'-O-methyl modified nucleotide
  modified_base 92: mod_base = OTHER; note = 2'-O-methyl modified nucleotide
  modified_base 93: mod_base = OTHER; note = 2'-O-methyl modified nucleotide
  modified_base 94: mod_base = OTHER; note = 2'-O-methyl modified nucleotide
  modified_base 95: mod_base = OTHER; note = 2'-O-methyl modified nucleotide
  modified_base 96: mod_base = OTHER; note = 2'-O-methyl modified nucleotide
  modified_base 97: mod_base = OTHER; note = 2'-O-methyl modified nucleotide with phosphorothioate linkage
  modified_base 98: mod_base = OTHER; note = 2'-O-methyl modified nucleotide with phosphorothioate linkage
  modified_base 99: mod_base = OTHER; note = 2'-O-methyl modified nucleotide with phosphorothioate linkage
  modified_base 100: mod_base = OTHER; note = 2'-O-methyl modified nucleotide

SEQ ID NO: 256 - RNA, 100 nt, synthetic construct; identical to SEQ ID NO: 223
  source 1..100: mol_type = other RNA; note = Description of Artificial Sequence: Synthetic polynucleotide
  modified_base 1: mod_base = OTHER; note = 2'-O-methyl modified nucleotide with phosphorothioate linkage
  modified_base 2: mod_base = OTHER; note = 2'-O-methyl modified nucleotide with phosphorothioate linkage
  modified_base 3: mod_base = OTHER; note = 2'-O-methyl modified nucleotide with phosphorothioate linkage
  modified_base 29: mod_base = OTHER; note = 2'-O-methyl modified nucleotide
  modified_base 30: mod_base = OTHER; note = 2'-O-methyl modified nucleotide
  modified_base 31: mod_base = OTHER; note = 2'-O-methyl modified nucleotide
  modified_base 32: mod_base = OTHER; note = 2'-O-methyl modified nucleotide
  modified_base 33: mod_base = OTHER; note = 2'-O-methyl modified nucleotide
  modified_base 34: mod_base = OTHER; note = 2'-O-methyl modified nucleotide
  modified_base 35: mod_base = OTHER; note = 2'-O-methyl modified nucleotide
  modified_base 36: mod_base = OTHER; note = 2'-O-methyl modified nucleotide
  modified_base 37: mod_base = OTHER; note = 2'-O-methyl modified nucleotide
  modified_base 38: mod_base = OTHER; note = 2'-O-methyl modified nucleotide
  modified_base 39: mod_base = OTHER; note = 2'-O-methyl modified nucleotide
  modified_base 40: mod_base = OTHER; note = 2'-O-methyl modified nucleotide
  modified_base 69: mod_base = OTHER; note = 2'-O-methyl modified nucleotide
  modified_base 70: mod_base = OTHER; note = 2'-O-methyl modified nucleotide
  modified_base 71: mod_base = OTHER; note = 2'-O-methyl modified nucleotide
  modified_base 72: mod_base = OTHER; note = 2'-O-methyl modified nucleotide
  modified_base 73: mod_base = OTHER; note = 2'-O-methyl modified nucleotide
  modified_base 74: mod_base = OTHER; note = 2'-O-methyl modified nucleotide
  modified_base 75: mod_base = OTHER; note = 2'-O-methyl modified nucleotide
  modified_base 76: mod_base = OTHER; note = 2'-O-methyl modified nucleotide
  modified_base 77: mod_base = OTHER; note = 2'-O-methyl modified nucleotide
  modified_base 78: mod_base = OTHER; note = 2'-O-methyl modified nucleotide
  modified_base 79: mod_base = OTHER; note = 2'-O-methyl modified nucleotide
  modified_base 80: mod_base = OTHER; note = 2'-O-methyl modified nucleotide
  modified_base 81: mod_base = OTHER; note = 2'-O-methyl modified nucleotide
  modified_base 82: mod_base = OTHER; note = 2'-O-methyl modified nucleotide
  modified_base 83: mod_base = OTHER; note = 2'-O-methyl modified nucleotide
  modified_base 84: mod_base = OTHER; note = 2'-O-methyl modified nucleotide
  modified_base 85: mod_base = OTHER; note = 2'-O-methyl modified nucleotide
  modified_base 86: mod_base = OTHER; note = 2'-O-methyl modified nucleotide
  modified_base 87: mod_base = OTHER; note = 2'-O-methyl modified nucleotide
  modified_base 88: mod_base = OTHER; note = 2'-O-methyl modified nucleotide
  modified_base 89: mod_base = OTHER; note = 2'-O-methyl modified nucleotide
  modified_base 90: mod_base = OTHER; note = 2'-O-methyl modified nucleotide
  modified_base 91: mod_base = OTHER; note = 2'-O-methyl modified nucleotide
  modified_base 92: mod_base = OTHER; note = 2'-O-methyl modified nucleotide
  modified_base 93: mod_base = OTHER; note = 2'-O-methyl modified nucleotide
  modified_base 94: mod_base = OTHER; note = 2'-O-methyl modified nucleotide
  modified_base 95: mod_base = OTHER; note = 2'-O-methyl modified nucleotide
  modified_base 96: mod_base = OTHER; note = 2'-O-methyl modified nucleotide
  modified_base 97: mod_base = OTHER; note = 2'-O-methyl modified nucleotide with phosphorothioate linkage
  modified_base 98: mod_base = OTHER; note = 2'-O-methyl modified nucleotide with phosphorothioate linkage
  modified_base 99: mod_base = OTHER; note = 2'-O-methyl modified nucleotide with phosphorothioate linkage
  modified_base 100: mod_base = OTHER; note = 2'-O-methyl modified nucleotide

SEQ ID NO: 257 - RNA, 100 nt, synthetic construct; identical to SEQ ID NO: 224
  source 1..100: mol_type = other RNA; note = Description of Artificial Sequence: Synthetic polynucleotide
  modified_base 1: mod_base = OTHER; note = 2'-O-methyl modified nucleotide with phosphorothioate linkage
  modified_base 2: mod_base = OTHER; note = 2'-O-methyl modified nucleotide with phosphorothioate linkage
  modified_base 3: mod_base = OTHER; note = 2'-O-methyl modified nucleotide with phosphorothioate linkage
  modified_base 29: mod_base = OTHER; note = 2'-O-methyl modified nucleotide
  modified_base 30: mod_base = OTHER; note = 2'-O-methyl modified nucleotide
  modified_base 31: mod_base = OTHER; note = 2'-O-methyl modified nucleotide
  modified_base 32: mod_base = OTHER; note = 2'-O-methyl modified nucleotide
  modified_base 33: mod_base = OTHER; note = 2'-O-methyl modified nucleotide
  modified_base 34: mod_base = OTHER; note = 2'-O-methyl modified nucleotide
  modified_base 35: mod_base = OTHER; note = 2'-O-methyl modified nucleotide
  modified_base 36: mod_base = OTHER; note = 2'-O-methyl modified nucleotide
  modified_base 37: mod_base = OTHER; note = 2'-O-methyl modified nucleotide
  modified_base 38: mod_base = OTHER; note = 2'-O-methyl modified nucleotide
  modified_base 39: mod_base = OTHER; note = 2'-O-methyl modified nucleotide
  modified_base 40: mod_base = OTHER; note = 2'-O-methyl modified nucleotide
  modified_base 69: mod_base = OTHER; note = 2'-O-methyl modified nucleotide
  modified_base 70: mod_base = OTHER; note = 2'-O-methyl modified nucleotide
  modified_base 71: mod_base = OTHER; note = 2'-O-methyl modified nucleotide
  modified_base 72: mod_base = OTHER; note = 2'-O-methyl modified nucleotide
  modified_base 73: mod_base = OTHER; note = 2'-O-methyl modified nucleotide
  modified_base 74: mod_base = OTHER; note = 2'-O-methyl modified nucleotide
  modified_base 75: mod_base = OTHER; note = 2'-O-methyl modified nucleotide
  modified_base 76: mod_base = OTHER; note = 2'-O-methyl modified nucleotide
  modified_base 77: mod_base = OTHER; note = 2'-O-methyl modified nucleotide
  modified_base 78: mod_base = OTHER; note = 2'-O-methyl modified nucleotide
  modified_base 79: mod_base = OTHER; note = 2'-O-methyl modified nucleotide
  modified_base 80: mod_base = OTHER; note = 2'-O-methyl modified nucleotide
  modified_base 81: mod_base = OTHER; note = 2'-O-methyl modified nucleotide
  modified_base 82: mod_base = OTHER; note = 2'-O-methyl modified nucleotide
  modified_base 83: mod_base = OTHER; note = 2'-O-methyl modified nucleotide
  modified_base 84: mod_base = OTHER; note = 2'-O-methyl modified nucleotide
  modified_base 85: mod_base = OTHER; note = 2'-O-methyl modified nucleotide
  modified_base 86: mod_base = OTHER; note = 2'-O-methyl modified nucleotide
  modified_base 87: mod_base = OTHER; note = 2'-O-methyl modified nucleotide
  modified_base 88: mod_base = OTHER; note = 2'-O-methyl modified nucleotide
  modified_base 89: mod_base = OTHER; note = 2'-O-methyl modified nucleotide
  modified_base 90: mod_base = OTHER; note = 2'-O-methyl modified nucleotide
  modified_base 91: mod_base = OTHER; note = 2'-O-methyl modified nucleotide
  modified_base 92: mod_base = OTHER; note = 2'-O-methyl modified nucleotide
  modified_base 93: mod_base = OTHER; note = 2'-O-methyl modified nucleotide
  modified_base 94: mod_base = OTHER; note = 2'-O-methyl modified nucleotide
  modified_base 95: mod_base = OTHER; note = 2'-O-methyl modified nucleotide
  modified_base 96: mod_base = OTHER; note = 2'-O-methyl modified nucleotide
  modified_base 97: mod_base = OTHER; note = 2'-O-methyl modified nucleotide with phosphorothioate linkage
  modified_base 98: mod_base = OTHER; note = 2'-O-methyl modified nucleotide with phosphorothioate linkage
  modified_base 99: mod_base = OTHER; note = 2'-O-methyl modified nucleotide with phosphorothioate linkage
  modified_base 100: mod_base = OTHER; note = 2'-O-methyl modified nucleotide

SEQ ID NO: 258 - RNA, 100 nt, synthetic construct; identical to SEQ ID NO: 225
  source 1..100: mol_type = other RNA; note = Description of Artificial Sequence: Synthetic polynucleotide
  modified_base 1: mod_base = OTHER; note = 2'-O-methyl modified nucleotide with phosphorothioate linkage
  modified_base 2: mod_base = OTHER; note = 2'-O-methyl modified nucleotide with phosphorothioate linkage
  modified_base 3: mod_base = OTHER; note = 2'-O-methyl modified nucleotide with phosphorothioate linkage
  modified_base 29: mod_base = OTHER; note = 2'-O-methyl modified nucleotide
  modified_base 30: mod_base = OTHER; note = 2'-O-methyl modified nucleotide
  modified_base 31: mod_base = OTHER; note = 2'-O-methyl modified nucleotide
  modified_base 32: mod_base = OTHER; note = 2'-O-methyl modified nucleotide
  modified_base 33: mod_base = OTHER; note = 2'-O-methyl modified nucleotide
  modified_base 34: mod_base = OTHER; note = 2'-O-methyl modified nucleotide
  modified_base 35: mod_base = OTHER; note = 2'-O-methyl modified nucleotide
  modified_base 36: mod_base = OTHER; note = 2'-O-methyl modified nucleotide
  modified_base 37: mod_base = OTHER; note = 2'-O-methyl modified nucleotide
  modified_base 38: mod_base = OTHER; note = 2'-O-methyl modified nucleotide
  modified_base 39: mod_base = OTHER; note = 2'-O-methyl modified nucleotide
  modified_base 40: mod_base = OTHER; note = 2'-O-methyl modified nucleotide
  modified_base 69: mod_base = OTHER; note = 2'-O-methyl modified nucleotide
  modified_base 70: mod_base = OTHER; note = 2'-O-methyl modified nucleotide
  modified_base 71: mod_base = OTHER; note = 2'-O-methyl modified nucleotide
  modified_base 72: mod_base = OTHER; note = 2'-O-methyl modified nucleotide
  modified_base 73: mod_base = OTHER; note = 2'-O-methyl modified nucleotide
  modified_base 74: mod_base = OTHER; note = 2'-O-methyl modified nucleotide
  modified_base 75: mod_base = OTHER; note = 2'-O-methyl modified nucleotide
  modified_base 76: mod_base = OTHER; note = 2'-O-methyl modified nucleotide
  modified_base 77: mod_base = OTHER; note = 2'-O-methyl modified nucleotide
  modified_base 78: mod_base = OTHER; note = 2'-O-methyl modified nucleotide
  modified_base 79: mod_base = OTHER; note = 2'-O-methyl modified nucleotide
  modified_base 80: mod_base = OTHER; note = 2'-O-methyl modified nucleotide
  modified_base 81: mod_base = OTHER; note = 2'-O-methyl modified nucleotide
  modified_base 82: mod_base = OTHER; note = 2'-O-methyl modified nucleotide
  modified_base 83: mod_base = OTHER; note = 2'-O-methyl modified nucleotide
  modified_base 84: mod_base = OTHER; note = 2'-O-methyl modified nucleotide
  modified_base 85: mod_base = OTHER; note = 2'-O-methyl modified nucleotide
  modified_base 86: mod_base = OTHER; note = 2'-O-methyl modified nucleotide
  modified_base 87: mod_base = OTHER; note = 2'-O-methyl modified nucleotide
  modified_base 88: mod_base = OTHER; note = 2'-O-methyl modified nucleotide
  modified_base 89: mod_base = OTHER; note = 2'-O-methyl modified nucleotide
  modified_base 90: mod_base = OTHER; note = 2'-O-methyl modified nucleotide
  modified_base 91: mod_base = OTHER; note = 2'-O-methyl modified nucleotide
  modified_base 92: mod_base = OTHER; note = 2'-O-methyl modified nucleotide
  modified_base 93: mod_base = OTHER; note = 2'-O-methyl modified nucleotide
  modified_base 94: mod_base = OTHER; note = 2'-O-methyl modified nucleotide
  modified_base 95: mod_base = OTHER; note = 2'-O-methyl modified nucleotide
  modified_base 96: mod_base = OTHER; note = 2'-O-methyl modified nucleotide
  modified_base 97: mod_base = OTHER; note = 2'-O-methyl modified nucleotide with phosphorothioate linkage
  modified_base 98: mod_base = OTHER; note = 2'-O-methyl modified nucleotide with phosphorothioate linkage
  modified_base 99: mod_base = OTHER; note = 2'-O-methyl modified nucleotide with phosphorothioate linkage
  modified_base 100: mod_base = OTHER; note = 2'-O-methyl modified nucleotide

SEQ ID NO: 259 - RNA, 100 nt, synthetic construct; identical to SEQ ID NO: 226
  source 1..100: mol_type = other RNA; note = Description of Artificial Sequence: Synthetic polynucleotide
  modified_base 1: mod_base = OTHER; note = 2'-O-methyl modified nucleotide with phosphorothioate linkage
  modified_base 2: mod_base = OTHER; note = 2'-O-methyl modified nucleotide with phosphorothioate linkage
  modified_base 3: mod_base = OTHER; note = 2'-O-methyl modified nucleotide with phosphorothioate linkage
  modified_base 29: mod_base = OTHER; note = 2'-O-methyl modified nucleotide
  modified_base 30: mod_base = OTHER; note = 2'-O-methyl modified nucleotide
  modified_base 31: mod_base = OTHER; note = 2'-O-methyl modified nucleotide
  modified_base 32: mod_base = OTHER; note = 2'-O-methyl modified nucleotide
  modified_base 33: mod_base = OTHER; note = 2'-O-methyl modified nucleotide
  modified_base 34: mod_base = OTHER; note = 2'-O-methyl modified nucleotide
  modified_base 35: mod_base = OTHER; note = 2'-O-methyl modified nucleotide
  modified_base 36: mod_base = OTHER; note = 2'-O-methyl modified nucleotide
  modified_base 37: mod_base = OTHER; note = 2'-O-methyl modified nucleotide
  modified_base 38: mod_base = OTHER; note = 2'-O-methyl modified nucleotide
  modified_base 39: mod_base = OTHER; note = 2'-O-methyl modified nucleotide
  modified_base 40: mod_base = OTHER; note = 2'-O-methyl modified nucleotide
  modified_base 69: mod_base = OTHER; note = 2'-O-methyl modified nucleotide
  modified_base 70: mod_base = OTHER; note = 2'-O-methyl modified nucleotide
  modified_base 71: mod_base = OTHER; note = 2'-O-methyl modified nucleotide
  modified_base 72: mod_base = OTHER; note = 2'-O-methyl modified nucleotide
  modified_base 73: mod_base = OTHER; note = 2'-O-methyl modified nucleotide
  modified_base 74: mod_base = OTHER; note = 2'-O-methyl modified nucleotide
  modified_base 75: mod_base = OTHER; note = 2'-O-methyl modified nucleotide
  modified_base 76: mod_base = OTHER; note = 2'-O-methyl modified nucleotide
  modified_base 77: mod_base = OTHER; note = 2'-O-methyl modified nucleotide
  modified_base 78: mod_base = OTHER; note = 2'-O-methyl modified nucleotide
  modified_base 79: mod_base = OTHER; note = 2'-O-methyl modified nucleotide
  modified_base 80: mod_base = OTHER; note = 2'-O-methyl modified nucleotide
  modified_base 81: mod_base = OTHER; note = 2'-O-methyl modified nucleotide
  modified_base 82: mod_base = OTHER; note = 2'-O-methyl modified nucleotide
  modified_base 83: mod_base = OTHER; note = 2'-O-methyl modified nucleotide
  modified_base 84: mod_base = OTHER; note = 2'-O-methyl modified nucleotide
  modified_base 85: mod_base = OTHER; note = 2'-O-methyl modified nucleotide
  modified_base 86: mod_base = OTHER; note = 2'-O-methyl modified nucleotide
  modified_base 87: mod_base = OTHER; note = 2'-O-methyl modified nucleotide
  modified_base 88: mod_base = OTHER; note = 2'-O-methyl modified nucleotide
  modified_base 89: mod_base = OTHER; note = 2'-O-methyl modified nucleotide
  modified_base 90: mod_base = OTHER; note = 2'-O-methyl modified nucleotide
  modified_base 91: mod_base = OTHER; note = 2'-O-methyl modified nucleotide
  modified_base 92: mod_base = OTHER; note = 2'-O-methyl modified nucleotide
  modified_base 93: mod_base = OTHER; note = 2'-O-methyl modified nucleotide
  modified_base 94: mod_base = OTHER; note = 2'-O-methyl modified nucleotide
  modified_base 95: mod_base = OTHER; note = 2'-O-methyl modified nucleotide
  modified_base 96: mod_base = OTHER; note = 2'-O-methyl modified nucleotide
  modified_base 97: mod_base = OTHER; note = 2'-O-methyl modified nucleotide with phosphorothioate linkage
  modified_base 98: mod_base = OTHER; note = 2'-O-methyl modified nucleotide with phosphorothioate linkage
  modified_base 99: mod_base = OTHER; note = 2'-O-methyl modified nucleotide with phosphorothioate linkage
  modified_base 100: mod_base = OTHER; note = 2'-O-methyl modified nucleotide

SEQ ID NO: 260 - RNA, 100 nt, synthetic construct; identical to SEQ ID NO: 45
  source 1..100: mol_type = other RNA; note = Description of Artificial Sequence: Synthetic polynucleotide
  modified_base 1: mod_base = OTHER; note = 2'-O-methyl modified nucleotide with phosphorothioate linkage
  modified_base 2: mod_base = OTHER; note = 2'-O-methyl modified nucleotide with phosphorothioate linkage
  modified_base 3: mod_base = OTHER; note = 2'-O-methyl modified nucleotide with phosphorothioate linkage
  modified_base 29: mod_base = OTHER; note = 2'-O-methyl modified nucleotide
  modified_base 30: mod_base = OTHER; note = 2'-O-methyl modified nucleotide
  modified_base 31: mod_base = OTHER; note = 2'-O-methyl modified nucleotide
  modified_base 32: mod_base = OTHER; note = 2'-O-methyl modified nucleotide
  modified_base 33: mod_base = OTHER; note = 2'-O-methyl modified nucleotide
  modified_base 34: mod_base = OTHER; note = 2'-O-methyl modified nucleotide
  modified_base 35: mod_base = OTHER; note = 2'-O-methyl modified nucleotide
  modified_base 36: mod_base = OTHER; note = 2'-O-methyl modified nucleotide
  modified_base 37: mod_base = OTHER; note = 2'-O-methyl modified nucleotide
  modified_base 38: mod_base = OTHER; note = 2'-O-methyl modified nucleotide
  modified_base 39: mod_base = OTHER; note = 2'-O-methyl modified nucleotide
  modified_base 40: mod_base = OTHER; note = 2'-O-methyl modified nucleotide
  modified_base 69: mod_base = OTHER; note = 2'-O-methyl modified nucleotide
  modified_base 70: mod_base = OTHER; note = 2'-O-methyl modified nucleotide
  modified_base 71: mod_base = OTHER; note = 2'-O-methyl modified nucleotide
  modified_base 72: mod_base = OTHER; note = 2'-O-methyl modified nucleotide
  modified_base 73: mod_base = OTHER; note = 2'-O-methyl modified nucleotide
  modified_base 74: mod_base = OTHER; note = 2'-O-methyl modified nucleotide
  modified_base 75: mod_base = OTHER; note = 2'-O-methyl modified nucleotide
  modified_base 76: mod_base = OTHER; note = 2'-O-methyl modified nucleotide
  modified_base 77: mod_base = OTHER; note = 2'-O-methyl modified nucleotide
  modified_base 78: mod_base = OTHER; note = 2'-O-methyl modified nucleotide
  modified_base 79: mod_base = OTHER; note = 2'-O-methyl modified nucleotide
  modified_base 80: mod_base = OTHER; note = 2'-O-methyl modified nucleotide
  modified_base 81: mod_base = OTHER; note = 2'-O-methyl modified nucleotide
  modified_base 82: mod_base = OTHER; note = 2'-O-methyl modified nucleotide
  modified_base 83: mod_base = OTHER; note = 2'-O-methyl modified nucleotide
  modified_base 84: mod_base = OTHER; note = 2'-O-methyl modified nucleotide
  modified_base 85: mod_base = OTHER; note = 2'-O-methyl modified nucleotide
  modified_base 86: mod_base = OTHER; note = 2'-O-methyl modified nucleotide
  modified_base 87: mod_base = OTHER; note = 2'-O-methyl modified nucleotide
  modified_base 88: mod_base = OTHER; note = 2'-O-methyl modified nucleotide
  modified_base 89: mod_base = OTHER; note = 2'-O-methyl modified nucleotide
  modified_base 90: mod_base = OTHER; note = 2'-O-methyl modified nucleotide
  modified_base 91: mod_base = OTHER; note = 2'-O-methyl modified nucleotide
  modified_base 92: mod_base = OTHER; note = 2'-O-methyl modified nucleotide
  modified_base 93: mod_base = OTHER; note = 2'-O-methyl modified nucleotide
  modified_base 94: mod_base = OTHER; note = 2'-O-methyl modified nucleotide
  modified_base 95: mod_base = OTHER; note = 2'-O-methyl modified nucleotide
  modified_base 96: mod_base = OTHER; note = 2'-O-methyl modified nucleotide
  modified_base 97: mod_base = OTHER; note = 2'-O-methyl modified nucleotide with phosphorothioate linkage
  modified_base 98: mod_base = OTHER; note = 2'-O-methyl modified nucleotide with phosphorothioate linkage
  modified_base 99: mod_base = OTHER; note = 2'-O-methyl modified nucleotide with phosphorothioate linkage
  modified_base 100: mod_base = OTHER; note = 2'-O-methyl modified nucleotide

SEQ ID NO: 261 - RNA, 100 nt, synthetic construct; identical to SEQ ID NO: 228
  source 1..100: mol_type = other RNA; note = Description of Artificial Sequence: Synthetic polynucleotide
  modified_base 1: mod_base = OTHER; note = 2'-O-methyl modified nucleotide with phosphorothioate linkage
  modified_base 2: mod_base = OTHER; note = 2'-O-methyl modified nucleotide with phosphorothioate linkage
  modified_base 3: mod_base = OTHER; note = 2'-O-methyl modified nucleotide with phosphorothioate linkage
  modified_base 29: mod_base = OTHER; note = 2'-O-methyl modified nucleotide
  modified_base 30: mod_base = OTHER; note = 2'-O-methyl modified nucleotide
  modified_base 31: mod_base = OTHER; note = 2'-O-methyl modified nucleotide
  modified_base 32: mod_base = OTHER; note = 2'-O-methyl modified nucleotide
  modified_base 33: mod_base = OTHER; note = 2'-O-methyl modified nucleotide
  modified_base 34: mod_base = OTHER; note = 2'-O-methyl modified nucleotide
  modified_base 35: mod_base = OTHER; note = 2'-O-methyl modified nucleotide
  modified_base 36: mod_base = OTHER; note = 2'-O-methyl modified nucleotide
  modified_base 37: mod_base = OTHER; note = 2'-O-methyl modified nucleotide
  modified_base 38: mod_base = OTHER; note = 2'-O-methyl modified nucleotide
  modified_base 39: mod_base = OTHER; note = 2'-O-methyl modified nucleotide
  modified_base 40: mod_base = OTHER; note = 2'-O-methyl modified nucleotide
  modified_base 69: mod_base = OTHER; note = 2'-O-methyl modified nucleotide
  modified_base 70: mod_base = OTHER; note = 2'-O-methyl modified nucleotide
  modified_base 71: mod_base = OTHER; note = 2'-O-methyl modified nucleotide
  modified_base 72: mod_base = OTHER; note = 2'-O-methyl modified nucleotide
  modified_base 73: mod_base = OTHER; note = 2'-O-methyl modified nucleotide
  modified_base 74: mod_base = OTHER; note = 2'-O-methyl modified nucleotide
  modified_base 75: mod_base = OTHER; note = 2'-O-methyl modified nucleotide
  modified_base 76: mod_base = OTHER; note = 2'-O-methyl modified nucleotide
  modified_base 77: mod_base = OTHER; note = 2'-O-methyl modified nucleotide
  modified_base 78: mod_base = OTHER; note = 2'-O-methyl modified nucleotide
  modified_base 79: mod_base = OTHER; note = 2'-O-methyl modified nucleotide
  modified_base 80: mod_base = OTHER; note = 2'-O-methyl modified nucleotide
  modified_base 81: mod_base = OTHER; note = 2'-O-methyl modified nucleotide
  modified_base 82: mod_base = OTHER; note = 2'-O-methyl modified nucleotide
  modified_base 83: mod_base = OTHER; note = 2'-O-methyl modified nucleotide
  modified_base 84: mod_base = OTHER; note = 2'-O-methyl modified nucleotide
  modified_base 85: mod_base = OTHER; note = 2'-O-methyl modified nucleotide
  modified_base 86: mod_base = OTHER; note = 2'-O-methyl modified nucleotide
  modified_base 87: mod_base = OTHER; note = 2'-O-methyl modified nucleotide
  modified_base 88: mod_base = OTHER; note = 2'-O-methyl modified nucleotide
  modified_base 89: mod_base = OTHER; note = 2'-O-methyl modified nucleotide
  modified_base 90: mod_base = OTHER; note = 2'-O-methyl modified nucleotide
  modified_base 91: mod_base = OTHER; note = 2'-O-methyl modified nucleotide
  modified_base 92: mod_base = OTHER; note = 2'-O-methyl modified nucleotide
  modified_base 93: mod_base = OTHER; note = 2'-O-methyl modified nucleotide
  modified_base 94: mod_base = OTHER; note = 2'-O-methyl modified nucleotide
  modified_base 95: mod_base = OTHER; note = 2'-O-methyl modified nucleotide
  modified_base 96: mod_base = OTHER; note = 2'-O-methyl modified nucleotide
  modified_base 97: mod_base = OTHER; note = 2'-O-methyl modified nucleotide with phosphorothioate linkage
  modified_base 98: mod_base = OTHER; note = 2'-O-methyl modified nucleotide with phosphorothioate linkage
  modified_base 99: mod_base = OTHER; note = 2'-O-methyl modified nucleotide with phosphorothioate linkage
  modified_base 100: mod_base = OTHER; note = 2'-O-methyl modified nucleotide

SEQ ID NO: 262 - RNA, 100 nt, synthetic construct; identical to SEQ ID NO: 229
  source 1..100: mol_type = other RNA; note = Description of Artificial Sequence: Synthetic polynucleotide
  modified_base 1: mod_base = OTHER; note = 2'-O-methyl modified nucleotide with phosphorothioate linkage
  modified_base 2: mod_base = OTHER; note = 2'-O-methyl modified nucleotide with phosphorothioate linkage
  modified_base 3: mod_base = OTHER; note = 2'-O-methyl modified nucleotide with phosphorothioate linkage
  modified_base 29: mod_base = OTHER; note = 2'-O-methyl modified nucleotide
  modified_base 30: mod_base = OTHER; note = 2'-O-methyl modified nucleotide
  modified_base 31: mod_base = OTHER; note = 2'-O-methyl modified nucleotide
  modified_base 32: mod_base = OTHER; note = 2'-O-methyl modified nucleotide
  modified_base 33: mod_base = OTHER; note = 2'-O-methyl modified nucleotide
  modified_base 34: mod_base = OTHER; note = 2'-O-methyl modified nucleotide
  modified_base 35: mod_base = OTHER; note = 2'-O-methyl modified nucleotide
  modified_base 36: mod_base = OTHER; note = 2'-O-methyl modified nucleotide
  modified_base 37: mod_base = OTHER; note = 2'-O-methyl modified nucleotide
  modified_base 38: mod_base = OTHER; note = 2'-O-methyl modified nucleotide
  modified_base 39: mod_base = OTHER; note = 2'-O-methyl modified nucleotide
  modified_base 40: mod_base = OTHER; note = 2'-O-methyl modified nucleotide
  modified_base 69: mod_base = OTHER; note = 2'-O-methyl modified nucleotide
  modified_base 70: mod_base = OTHER; note = 2'-O-methyl modified nucleotide
  modified_base 71: mod_base = OTHER; note = 2'-O-methyl modified nucleotide
  modified_base 72: mod_base = OTHER; note = 2'-O-methyl modified nucleotide
  modified_base 73: mod_base = OTHER; note = 2'-O-methyl modified nucleotide
  modified_base 74: mod_base = OTHER; note = 2'-O-methyl modified nucleotide
  modified_base 75: mod_base = OTHER; note = 2'-O-methyl modified nucleotide
  modified_base 76: mod_base = OTHER; note = 2'-O-methyl modified nucleotide
  modified_base 77: mod_base = OTHER; note = 2'-O-methyl modified nucleotide
  modified_base 78: mod_base = OTHER; note = 2'-O-methyl modified nucleotide
  modified_base 79: mod_base = OTHER; note = 2'-O-methyl modified nucleotide
  modified_base 80: mod_base = OTHER; note = 2'-O-methyl modified nucleotide
  modified_base 81: mod_base = OTHER; note = 2'-O-methyl modified nucleotide
  modified_base 82: mod_base = OTHER; note = 2'-O-methyl modified nucleotide
  modified_base 83: mod_base = OTHER; note = 2'-O-methyl modified nucleotide
  modified_base 84: mod_base = OTHER; note = 2'-O-methyl modified nucleotide
  modified_base 85: mod_base = OTHER; note = 2'-O-methyl modified nucleotide
  modified_base 86: mod_base = OTHER; note = 2'-O-methyl modified nucleotide
  modified_base 87: mod_base = OTHER; note = 2'-O-methyl modified nucleotide
  modified_base 88: mod_base = OTHER; note = 2'-O-methyl modified nucleotide
  modified_base 89: mod_base = OTHER; note = 2'-O-methyl modified nucleotide
  modified_base 90: mod_base = OTHER; note = 2'-O-methyl modified nucleotide
  modified_base 91: mod_base = OTHER; note = 2'-O-methyl modified nucleotide
  modified_base 92: mod_base = OTHER; note = 2'-O-methyl modified nucleotide
  modified_base 93: mod_base = OTHER; note = 2'-O-methyl modified nucleotide
  modified_base 94: mod_base = OTHER; note = 2'-O-methyl modified nucleotide
  modified_base 95: mod_base = OTHER; note = 2'-O-methyl modified nucleotide
  modified_base 96: mod_base = OTHER; note = 2'-O-methyl modified nucleotide
  modified_base 97: mod_base = OTHER; note = 2'-O-methyl modified nucleotide with phosphorothioate linkage
  modified_base 98: mod_base = OTHER; note = 2'-O-methyl modified nucleotide with phosphorothioate linkage
  modified_base 99: mod_base = OTHER; note = 2'-O-methyl modified nucleotide with phosphorothioate linkage
  modified_base 100: mod_base = OTHER; note = 2'-O-methyl modified nucleotide

SEQ ID NO: 263 - DNA, 145 bp, synthetic construct
  source 1..145: mol_type = other DNA; note = Description of Artificial Sequence: Synthetic polynucleotide
ttggccactccctctctgcgcgctcgctcgctcactgaggccgggcgaccaaaggtcgcccgacgcccgggctttgcccgggcggcctcagtgagcgagcgagcgcgcagagagggagtggccaactccatcactaggggttcct

SEQ ID NO: 264 - DNA, 100 bp, synthetic construct
  source 1..100: mol_type = other DNA; note = Description of Artificial Sequence: Synthetic polynucleotide
taggtcagtgaagagaagaacaaaaagcagcatattacagttagttgtcttcatcaatctttaaatatgttgtgtggtttttctctccctgtttccacag

SEQ ID NO: 265 - DNA, 1296 bp, synthetic construct
  source 1..1296: mol_type = other DNA; note = Description of Artificial Sequence: Synthetic polynucleotide
tttcttgatcatgaaaacgccaacaaaattctgaatcggccaaagaggtataattcaggtaaattggaagagtttgttcaagggaaccttgagagagaatgtatggaagaaaagtgtagttttgaagaagcacgagaagtttttgaaaacactgaaagaacaactgaattttggaagcagtatgttgatggagatcagtgtgagtccaatccatgtttaaatggcggcagttgcaaggatgacattaattcctatgaatgttggtgtccctttggatttgaaggaaagaactgtgaattagatgtaacatgtaacattaagaatggcagatgcgagcagttttgtaaaaatagtgctgataacaaggtggtttgctcctgtactgagggatatcgacttgcagaaaaccagaagtcctgtgaaccagcagtgccatttccatgtggaagagtttctgtttcacaaacttctaagctcacccgtgctgagactgtttttcctgatgtggactatgtaaattctactgaagctgaaaccattttggataacatcactcaaagcacccaatcatttaatgacttcactcgggttgttggtggagaagatgccaaaccaggtcaattcccttggcaggttgttttgaatggtaaagttgatgcattctgtggaggctctatcgttaatgaaaaatggattgtaactgctgcccactgtgttgaaactggtgttaaaattacagttgtcgcaggtgaacataatattgaggagacagaacatacagagcaaaagcgaaatgtgattcgaattattcctcaccacaactacaatgcagctattaataagtacaaccatgacattgcccttctggaactggacgaacccttagtgctaaacagctacgttacacctatttgcattgctgacaaggaatacacgaacatcttcctcaaatttggatctggctatgtaagtggctggggaagagtcttccacaaagggagatcagctttagttcttcagtaccttagagttccacttgttgaccgagccacatgtcttctatctacaaagttcaccatctataacaacatgttctgtgctggcttccatgaaggaggtagagattcatgtcaaggagatagtgggggaccccatgttactgaagtggaagggaccagtttcttaactggaattattagctggggtgaagagtgtgcaatgaaaggcaaatatggaatatataccaaggtatcccggtatgtcaactggattaaggaaaaaacaaagctcacttaa

SEQ ID NO: 266 - DNA, 276 bp, synthetic construct
  source 1..276: mol_type = other DNA; note = Description of Artificial Sequence: Synthetic polynucleotide
cctcgactgtgccttctagttgccagccatctgttgtttgcccctcccccgtgccttccttgaccctggaaggtgccactcccactgtcctttcctaataaaatgaggaaattgcatcgcattgtctgagtaggtgtcattctattctggggggtggggtggggcaggacagcaagggggaggattgggaagacaatagcaggcatgctggggatgcggtgggctctatggcttctgaggcggaaagaaccagctggggctctagggggtatcccc

SEQ ID NO: 267 - DNA, 192 bp, synthetic construct
  source 1..192: mol_type = other DNA; note = Description of Artificial Sequence: Synthetic polynucleotide
aaaaaacctcccacacctccccctgaacctgaaacataaaatgaatgcaattgttgttgttaacttgtttattgcagcttataatggttacaaataaagcaatagcatcacaaatttcacaaataaagcatttttttcactgcattctagttgtggtttgtccaaactcatcaatgtatcttatcatgtctg

SEQ ID NO: 268 - DNA, 1296 bp, synthetic construct
  source 1..1296: mol_type = other DNA; note = Description of Artificial Sequence: Synthetic polynucleotide
ttaggtgagcttagtcttttcttttatccaattcacgtagcgagagaccttcgtatagatgccatatttccccttcatcgcacattcctccccccaacttattatcccggtcaagaaacttgttccttcgacttcagtgacgtgtggtccacctgaatcaccttggcatgagtcgcgaccgccctcgtgaaacccagcacaaaacatgttattgtaaatcgtaaatttcgtggacagaagacaggtcgctctatcgaccaacgggacgcgcaaatattgcagaacgagggctgatcgacctttgtggaagacccgcccccacccactcacatatccgctcccaaatttcaagaagatatttgtatattctttatcggctatacaaatcggggtaacataggagttaagtacgagtggctcgtccagctccaggagggctatatcatggttgtacttgtttatagcggcattataattgtgatggggtatgatcctgataacattccttttctgttcagtatgctcagtttcttcaatgttgtgttcgccagccacgaccgtaatcttaacccccgtctcgacacagtgtgcggccgttacaatccacttttcattgactatggagcccccacaaaacgcgtcgacttttccgttgagcaccacctgccatggaaattggccaggtttagcgtcctcgcccccgacaaccctagtaaagtcattaaatgactgtgtggattgtgttatattatcaagaatcgtttcggcttcagtagagttaacgtagtccacatcgggaaaaactgtctcggcccttgtcaactttgatgtctgggacacacttacccgaccgcacgggaagggcaccgccggttcacagctcttttgattctcagcgagccggtagccctcagtgcaactacacacaactttgttgtcggcggaatttttacagaattgctcgcatcgtccatttttaatgttgcaggtgacgtccaactcgcagttttttccttcaaaaccaaaagggcaccaacactcgtaggaatttatatcgtctttacaactccccccattcagacatggattagattcgcattggtccccatcgacatattgcttccagaactcagtggtccgttctgtattctcaaacacctcgcgcgcttcttcaaaactgcatttttcctccatacactctcgctccaagttcccttgcacgaattcttcaagctttcctgagttataccttttaggccggttaagtatcttattcgcgttttcgtggtccagaaa

SEQ ID NO: 269 - DNA, 100 bp, synthetic construct
  source 1..100: mol_type = other DNA; note = Description of Artificial Sequence: Synthetic polynucleotide
ctgtggaaacagggagagaaaaaccacacaacatatttaaagattgatgaagacaactaactgtaatatgctgctttttgttcttctcttcactgaccta

SEQ ID NO: 270 - DNA, 145 bp, synthetic construct
  source 1..145: mol_type = other DNA; note = Description of Artificial Sequence: Synthetic polynucleotide
aggaacccctagtgatggagttggccactccctctctgcgcgctcgctcgctcactgaggccgcccgggcaaagcccgggcgtcgggcgacctttggtcgcccggcctcagtgagcgagcgagcgcgcagagagggagtggccaa

SEQ ID NO: 271 - DNA, 100 bp, synthetic construct
  source 1..100: mol_type = other DNA; note = Description of Artificial Sequence: Synthetic polynucleotide
gattatttggattaaaaacaaagactttcttaagagatgtaaaattttcatgatgttttcttttttgctaaaactaaagaattattcttttacatttcag

SEQ ID NO: 272 - DNA, 1329 bp, synthetic construct
  source 1..1329: mol_type = other DNA; note = Description of Artificial Sequence: Synthetic polynucleotide
tttcttgatcatgaaaacgccaacaaaattctgaatcggccaaagaggtataattcaggtaaattggaagagtttgttcaagggaaccttgagagagaatgtatggaagaaaagtgtagttttgaagaagcacgagaagtttttgaaaacactgaaagaacaactgaattttggaagcagtatgttgatggagatcagtgtgagtccaatccatgtttaaatggcggcagttgcaaggatgacattaattcctatgaatgttggtgtccctttggatttgaaggaaagaactgtgaattagatgtaacatgtaacattaagaatggcagatgcgagcagttttgtaaaaatagtgctgataacaaggtggtttgctcctgtactgagggatatcgacttgcagaaaaccagaagtcctgtgaaccagcagtgccatttccatgtggaagagtttctgtttcacaaacttctaagctcacccgtgctgagactgtttttcctgatgtggactatgtaaattctactgaagctgaaaccattttggataacatcactcaaagcacccaatcatttaatgacttcactcgggttgttggtggagaagatgccaaaccaggtcaattcccttggcaggttgttttgaatggtaaagttgatgcattctgtggaggctctatcgttaatgaaaaatggattgtaactgctgcccactgtgttgaaactggtgttaaaattacagttgtcgcaggtgaacataatattgaggagacagaacatacagagcaaaagcgaaatgtgattcgaattattcctcaccacaactacaatgcagctattaataagtacaaccatgacattgcccttctggaactggacgaacccttagtgctaaacagctacgttacacctatttgcattgctgacaaggaatacacgaacatcttcctcaaatttggatctggctatgtaagtggctggggaagagtcttccacaaagggagatcagctttagttcttcagtaccttagagttccacttgttgaccgagccacatgtcttctatctacaaagttcaccatctataacaacatgttctgtgctggcttccatgaaggaggtagagattcatgtcaaggagatagtgggggaccccatgttactgaagtggaagggaccagtttcttaactggaattattagctggggtgaagagtgtgcaatgaaaggcaaatatggaatatataccaaggtctcccggtatgtcaactggattaaggaaaaaacaaagctcactgtcagcggatggagactgttcaagaagatcagctaa

SEQ ID NO: 273 - DNA, 1329 bp, synthetic construct
  source 1..1329: mol_type = other DNA; note = Description of Artificial Sequence: Synthetic polynucleotide
ttaggaaatcttcttaaacagccgccagccgctcacggtgagcttagtcttttcttttatccaattcacgtagcgagagaccttcgtatagatgccatatttccccttcatcgcacattcctccccccaacttattatcccggtcaagaaacttgttccttcgacttcagtgacgtgtggtccacctgaatcaccttggcatgagtcgcgaccgccctcgtgaaacccagcacaaaacatgttattgtaaatcgtaaatttcgtggacagaagacaggtcgctctatcgaccaacgggacgcgcaaatattgcagaacgagggctgatcgacctttgtggaagacccgcccccacccactcacatatccgctcccaaatttcaagaagatatttgtatattctttatcggctatacaaatcggggtaacataggagttaagtacgagtggctcgtccagctccaggagggctatatcatggttgtacttgtttatagcggcattataattgtgatggggtatgatcctgataacattccttttctgttcagtatgctcagtttcttcaatgttgtgttcgccagccacgaccgtaatcttaacccccgtctcgacacagtgtgcggccgttacaatccacttttcattgactatggagcccccacaaaacgcgtcgacttttccgttgagcaccacctgccatggaaattggccaggtttagcgtcctcgcccccgacaaccctagtaaagtcattaaatgactgtgtggattgtgttatattatcaagaatcgtttcggcttcagtagagttaacgtagtccacatcgggaaaaactgtctcggcccttgtcaactttgatgtctgggacacacttacccgaccgcacgggaagggcaccgccggttcacagctcttttgattctcagcgagccggtagccctcagtgcaactacacacaactttgttgtcggcggaatttttacagaattgctcgcatcgtccatttttaatgttgcaggtgacgtccaactcgcagttttttccttcaaaaccaaaagggcaccaacactcgtaggaatttatatcgtctttacaactccccccattcagacatggattagattcgcattggtccccatcgacatattgcttccagaactcagtggtccgttctgtattctcaaacacctcgcgcgcttcttcaaaactgcatttttcctccatacactctcgctccaagttcccttgcacgaattcttcaagctttcctgagttataccttttaggccggttaagtatcttattcgcgttttcgtggtccagaaa

SEQ ID NO: 274 - DNA, 100 bp, synthetic construct
  source 1..100: mol_type = other DNA; note = Description of Artificial Sequence: Synthetic polynucleotide
ctgaaatgtaaaagaataattctttagttttagcaaaaaagaaaacatcatgaaaattttacatctcttaagaaagtctttgtttttaatccaaataatc

SEQ ID NO: 275 - DNA, 1446 bp, synthetic construct
  source 1..1446: mol_type = other DNA; note = Description of Artificial Sequence: Synthetic polynucleotide
tttcttgatcatgaaaacgccaacaaaattctgaatcggccaaagaggtataattcaggtaaattggaagagtttgttcaagggaaccttgagagagaatgtatggaagaaaagtgtagttttgaagaagcagtattcactttggaggactttgtcggtgactggaggcaaaccgctggttataatctcgaccaagtactggaacagggcggggtaagttccctctttcagaatttgggtgtaagcgtcacaccaatccagcggattgtgttgtctggagagaacggactcaaaattgacatccatgttatcattccatatgaaggtctcagtggagaccaaatggggcagatcgagaagattttcaaggtagtttacccagtcgacgatcaccacttcaaagtcattctccactatggcacacttgttatcgacggagtaactcctaatatgattgattactttggtcgcccgtatgagggcatcgcagtgtttgatggcaaaaagatcaccgtaacaggaacgttgtggaatgggaacaagataatcgacgagagattgataaatccagacgggtcactcctgttcagggttacaattaacggcgtcacaggatggagactctgtgaacgaatactggccacaaatttttcactcctgaagcaggccggagacgtggaggaaaacccagggcccgtgagcaagggcgaggagctgttcaccggggtggtgcccatcctggtcgagctggacggcgacgtaaacggccacaagttcagcgtgtccggcgagggcgagggcgatgccacctacggcaagctgaccctgaagttcatctgcaccaccggcaagctgcccgtgccctggcccaccctcgtgaccaccctgacctacggcgtgcagtgcttcagccgctaccccgaccacatgaagcagcacgacttcttcaagtccgccatgcccgaaggctacgtccaggagcgcaccatcttcttcaaggacgacggcaactacaagacccgcgccgaggtgaagttcgagggcgacaccctggtgaaccgcatcgagctgaagggcatcgacttcaaggaggacggcaacatcctggggcacaagctggagtacaactacaacagccacaacgtctatatcatggccgacaagcagaagaacggcatcaaggtgaacttcaagatccgccacaacatcgaggacggcagcgtgcagctcgccgaccactaccagcagaacacccccatcggcgacggccccgtgctgctgcccgacaaccactacctgagcacccagtccgccctgagcaaagaccccaacgagaagcgcgatcacatggtcctgctggagttcgtgaccgccgccgggatcactctcggcatggacgagctgtacaagggaggaggaagcccgaagaagaagagaaaggtctaa

SEQ ID NO: 276 - DNA, 1446 bp, synthetic construct
  source 1..1446: mol_type = other DNA; note = Description of Artificial Sequence: Synthetic polynucleotide
ttacaccttcctcttcttcttggggctgccgccgcccttgtacagctcgtccatgcccagggtgatgccggcggcggtcacgaactccagcagcaccatgtggtccctcttctcgttggggtccttgctcagggcgctctgggtgctcaggtagtggttgtcgggcagcagcacggggccgtcgccgatgggggtgttctgctggtagtggtcggccagctgcacgctgccgtcctcgatgttgtgcctgatcttgaagttcaccttgatgccgttcttctgcttgtcggccatgatgtacacgttgtggctgttgtagttgtactccagcttgtggcccaggatgttgccgtcctccttgaagtcgatgcccttcagctcgatcctgttcaccagggtgtcgccctcgaacttcacctcggccctggtcttgtagttgccgtcgtccttgaagaagatggtcctctcctgcacgtagccctcgggcatggcgctcttgaagaagtcgtgctgcttcatgtggtcggggtacctgctgaagcactgcacgccgtaggtcagggtggtcaccagggtgggccagggcacgggcagcttgccggtggtgcagatgaacttcagggtcagcttgccgtaggtggcgtcgccctcgccctcgccgctcacgctgaacttgtggccgttcacgtcgccgtccagctccaccaggatgggcaccacgccggtgaacagctcctcgcccttgctcacggggccggggttctcctccacgtcgccggcctgcttcagcaggctgaagttggtggccaggatcctctcgcacagcctccagccggtcacgccgttgatggtcaccctgaacagcaggctgccgtcggggttgatcagcctctcgtcgatgatcttgttgccgttccacagggtgccggtcacggtgatcttcttgccgtcgaacacggcgatgccctcgtagggcctgccgaagtagtcgatcatgttgggggtcacgccgtcgatcaccagggtgccgtagtgcaggatcaccttgaagtggtggtcgtccacggggtacaccaccttgaaaatcttctcgatctggcccatctggtcgccgctcaggccctcgtaggggatgatcacgtggatgtcgatcttcaggccgttctcgccgctcagcacgatcctctggatgggggtcacgctcacgcccaggttctggaacaggctgctcacgccgccctgctccagcacctggtccaggttgtagccggcggtctgcctccagtcgcccacgaagtcctccagggtgaacacggcctcctcgaagctgcacttctcctccatgcactccctctccaggttgccctgcacgaactcctccagcttgccgctgttgtacctcttgggcctgttcaggatcttgttggcgttctcgtggtccaggaa

SEQ ID NO: 277 - DNA, 3570 bp, synthetic construct
  source 1..3570: mol_type = other DNA; note = Description of Artificial Sequence: Synthetic polynucleotide
ttggccactccctctctgcgcgctcgctcgctcactgaggccgggcgaccaaaggtcgcccgacgcccgggctttgcccgggcggcctcagtgagcgagcgagcgcgcagagagggagtggccaactccatcactaggggttcctagatctcttaggtcagtgaagagaagaacaaaaagcagcatattacagttagttgtcttcatcaatctttaaatatgttgtgtggtttttctctccctgtttccacagtttttcttgatcatgaaaacgccaacaaaattctgaatcggccaaagaggtataattcaggtaaattggaagagtttgttcaagggaaccttgagagagaatgtatggaagaaaagtgtagttttgaagaagcacgagaagtttttgaaaacactgaaagaacaactgaattttggaagcagtatgttgatggagatcagtgtgagtccaatccatgtttaaatggcggcagttgcaaggatgacattaattcctatgaatgttggtgtccctttggatttgaaggaaagaactgtgaattagatgtaacatgtaacattaagaatggcagatgcgagcagttttgtaaaaatagtgctgataacaaggtggtttgctcctgtactgagggatatcgacttgcagaaaaccagaagtcctgtgaaccagcagtgccatttccatgtggaagagtttctgtttcacaaacttctaagctcacccgtgctgagactgtttttcctgatgtggactatgtaaattctactgaagctgaaaccattttggataacatcactcaaagcacccaatcatttaatgacttcactcgggttgttggtggagaagatgccaaaccaggtcaattcccttggcaggttgttttgaatggtaaagttgatgcattctgtggaggctctatcgttaatgaaaaatggattgtaactgctgcccactgtgttgaaactggtgttaaaattacagttgtcgcaggtgaacataatattgaggagacagaacatacagagcaaaagcgaaatgtgattcgaattattcctcaccacaactacaatgcagctattaataagtacaaccatgacattgcccttctggaactggacgaacccttagtgctaaacagctacgttacacctatttgcattgctgacaaggaatacacgaacatcttcctcaaatttggatctggctatgtaagtggctggggaagagtcttccacaaagggagatcagctttagttcttcagtaccttagagttccacttgttgaccgagccacatgtcttctatctacaaagttcaccatctataacaacatgttctgtgctggcttccatgaaggaggtagagattcatgtcaaggagatagtgggggaccccatgttactgaagtggaagggaccagtttcttaactggaattattagctggggtgaagagtgtgcaatgaaaggcaaatatggaatatataccaaggtatcccggtatgtcaactggattaaggaaaaaacaaagctcacttaacctcgactgtgccttctagttgccagccatctgttgtttgcccctcccccgtgccttccttgaccctggaaggtgccactcccactgtcctttcctaataaaatgaggaaattgcatcgcattgtctgagtaggtgtcattctattctggggggtggggtggggcaggacagcaagggggaggattgggaagacaatagcaggcatgctggggatgcggtgggctctatggcttctgaggcggaaagaaccagctggggctctagggggtatccccaaaaaacctcccacacctccccctgaacctgaaacataaaatgaatgcaattgttgttgttaacttgtttattgcagcttataatggttacaaataaagcaatagcatcacaaatttcacaaataaagcatttttttcactgcattctagttgtggtttgtccaaactcatcaatgtatcttatcatgtctgttaggtgagcttagtcttttcttttatccaattcacgtagcgagagaccttcgtatagatgccatatttccccttcatcgcacattcctccccccaacttattatcccggtcaagaaacttgttccttcgacttcagtgacgtgtggtccacctgaatcaccttggcatgagtcgcgaccgccctcgtgaaacccagcacaaaacatgttattgtaaatcgtaaatttcgtggacagaagacaggtcgctctatcgaccaacgggacgcgcaaatattgcagaacgagggctgatcgacctttgtggaagacccgcccccacccactcacatatccgctcccaaatttcaagaagatatttgtatattctttatcggctatacaaatcggggtaacataggagttaagtacgagtggctcgtccagctccaggagggctatatcatggttgtacttgtttatagcggcattataattgtgatggggtatgatcctgataacattccttttctgttcagtatgctcagtttcttcaatgttgtgttcgccagccacgaccgtaatcttaacccccgtctcgacacagtgtgcggccgttacaatccacttttcattgactatggagcccccacaaaacgcgtcgacttttccgttgagcaccacctgccatggaaattggccaggtttagcgtcctcgcccccgacaaccctagtaaagtcattaaatgactgtgtggattgtgttatattatcaagaatcgtttcggcttcagtagagttaacgtagtccacatcgggaaaaactgtctcggcccttgtcaactttgatgtctgggacacacttacccgaccgcacgggaagggcaccgccggttcacagctcttttgattctcagcgagccggtagccctcagtgcaactacacacaactttgttgtcggcggaatttttacagaattgctcgcatcgtccatttttaatgttgcaggtgacgtccaactcgcagttttttccttcaaaaccaaaagggcaccaacactcgtaggaatttatatcgtctttacaactccccccattcagacatggattagattcgcattggtccccatcgacatattgcttccagaactcagtggtccgttctgtattctcaaacacctcgcgcgcttcttcaaaactgcatttttcctccatacactctcgctccaagttcccttgcacgaattcttcaagctttcctgagttataccttttaggccggttaagtatcttattcgcgttttcgtggtccagaaaaactgtggaaacagggagagaaaaaccacacaacatatttaaagattgatgaagacaactaactgtaatatgctgctttttgttcttctcttcactgacctaagagatctaggaacccctagtgatggagttggccactccctctctgcgcgctcgctcgctcactgaggccgcccgggcaaagcccgggcgtcgggcgacctttggtcgcccggcctcagtgagcgagcgagcgcgcagagagggagtggccaa

SEQ ID NO: 278 - DNA, 3636 bp, synthetic construct
  source 1..3636: mol_type = other DNA; note = Description of Artificial Sequence: Synthetic polynucleotide
ttggccactccctctctgcgcgctcgctcgctcactgaggccgggcgaccaaaggtcgcccgacgcccgggctttgcccgggcggcctcagtgagcgagcgagcgcgcagagagggagtggccaactccatcactaggggttcctagatctctgattatttggattaaaaacaaagactttcttaagagatgtaaaattttcatgatgttttcttttttgctaaaactaaagaattattcttttacatttcagtttttcttgatcatgaaaacgccaacaaaattctgaatcggccaaagaggtataattcaggtaaattggaagagtttgttcaagggaaccttgagagagaatgtatggaagaaaagtgtagttttgaagaagcacgagaagtttttgaaaacactgaaagaacaactgaattttggaagcagtatgttgatggagatcagtgtgagtccaatccatgtttaaatggcggcagttgcaaggatgacattaattcctatgaatgttggtgtccctttggatttgaaggaaagaactgtgaattagatgtaacatgtaacattaagaatggcagatgcgagcagttttgtaaaaatagtgctgataacaaggtggtttgctcctgtactgagggatatcgacttgcagaaaaccagaagtcctgtgaaccagcagtgccatttccatgtggaagagtttctgtttcacaaacttctaagctcacccgtgctgagactgtttttcctgatgtggactatgtaaattctactgaagctgaaaccattttggataacatcactcaaagcacccaatcatttaatgacttcactcgggttgttggtggagaagatgccaaaccaggtcaattcccttggcaggttgttttgaatggtaaagttgatgcattctgtggaggctctatcgttaatgaaaaatggattgtaactgctgcccactgtgttgaaactggtgttaaaattacagttgtcgcaggtgaacataatattgaggagacagaacatacagagcaaaagcgaaatgtgattcgaattattcctcaccacaactacaatgcagctattaataagtacaaccatgacattgcccttctggaactggacgaacccttagtgctaaacagctacgttacacctatttgcattgctgacaaggaatacacgaacatcttcctcaaatttggatctggctatgtaagtggctggggaagagtcttccacaaagggagatcagctttagttcttcagtaccttagagttccacttgttgaccgagccacatgtcttctatctacaaagttcaccatctataacaacatgttctgtgctggcttccatgaaggaggtagagattcatgtcaaggagatagtgggggaccccatgttactgaagtggaagggaccagtttcttaactggaattattagctggggtgaagagtgtgcaatgaaaggcaaatatggaatatataccaaggtctcccggtatgtcaactggattaaggaaaaaacaaagctcactgtcagcggatggagactgttcaagaagatcagctaacctcgactgtgccttctagttgccagccatctgttgtttgcccctcccccgtgccttccttgaccctggaaggtgccactcccactgtcctttcctaataaaatgaggaaattgcatcgcattgtctgagtaggtgtcattctattctggggggtggggtggggcaggacagcaagggggaggattgggaagacaatagcaggcatgctggggatgcggtgggctctatggcttctgaggcggaaagaaccagctggggctctagggggtatccccaaaaaacctcccacacctccccctgaacctgaaacataaaatgaatgcaattgttgttgttaacttgtttattgcagcttataatggttacaaataaagcaatagcatcacaaatttcacaaataaagcatttttttcactgcattctagttgtggtttgtccaaactcatcaatgtatcttatcatgtctgttaggaaatcttcttaaacagccgccagccgctcacggtgagcttagtcttttcttttatccaattcacgtagcgagagaccttcgtatagatgccatatttccccttcatcgcacattcctccccccaacttattatcccggtcaagaaacttgttccttcgacttcagtgacgtgtggtccacctgaatcaccttggcatgagtcgcgaccgccctcgtgaaacccagcacaaaacatgttattgtaaatcgtaaatttcgtggacagaagacaggtcgctctatcgaccaacgggacgcgcaaatattgcagaacgagggctgatcgacctttgtggaagacccgcccccacccactcacatatccgctcccaaatttcaagaagatatttgtatattctttatcggctatacaaatcggggtaacataggagttaagtacgagtggctcgtccagctccaggagggctatatcatggttgtacttgtttatagcggcattataattgtgatggggtatgatcctgataacattccttttctgttcagtatgctcagtttcttcaatgttgtgttcgccagccacgaccgtaatcttaacccccgtctcgacacagtgtgcggccgttacaatccacttttcattgactatggagcccccacaaaacgcgtcgacttttccgttgagcaccacctgccatggaaattggccaggtttagcgtcctcgcccccgacaaccctagtaaagtcattaaatgactgtgtggattgtgttatattatcaagaatcgtttcggcttcagtagagttaacgtagtccacatcgggaaaaactgtctcggcccttgtcaactttgatgtctgggacacacttacccgaccgcacgggaagggcaccgccggttcacagctcttttgattctcagcgagccggtagccctcagtgcaactacacacaactttgttgtcggcggaatttttacagaattgctcgcatcgtccatttttaatgttgcaggtgacgtccaactcgcagttttttccttcaaaaccaaaagggcaccaacactcgtaggaatttatatcgtctttacaactccccccattcagacatggattagattcgcattggtccccatcgacatattgcttccagaactcagtggtccgttctgtattctcaaacacctcgcgcgcttcttcaaaactgcatttttcctccatacactctcgctccaagttcccttgcacgaattcttcaagctttcctgagttataccttttaggccggttaagtatcttattcgcgttttcgtggtccagaaaaactgaaatgtaaaagaataattctttagttttagcaaaaaagaaaacatcatgaaaattttacatctcttaagaaagtctttgtttttaatccaaataatcagagatctaggaacccctagtgatggagttggccactccctctctgcgcgctcgctcgctcactgaggccgcccgggcaaagcccgggcgtcgggcgacctttggtcgcccggcctcagtgagcgagcgagcgcgcagagagggagtggccaa

SEQ ID NO: 279 - DNA, 3615 bp, synthetic construct
  source 1..3615: mol_type = other DNA; note = Description of Artificial Sequence: Synthetic polynucleotide
ttggccactccctctctgcgcgctcgctcgctcactgaggccgggcgaccaaaggtcgcccgacgcccgggctttgcccgggcggcctcagtgagcgagcgagcgcgcagagagggagtggccaactccatcactaggggttcctagatctcttaggtcagtgaagagaagaacaaaaagcagcatattacagttagttgtcttcatcaatctttaaatatgttgtgtggtttttctctccctgtttccacagtttttcttgatcatgaaaacgccaacaaaattctgaatcggccaaagaggtataattcaggtaaattggaagagtttgttcaagggaaccttgagagagaatgtatggaagaaaagtgtagttttgaagaagcagtattcactttggaggactttgtcggtgactggaggcaaaccgctggttataatctcgaccaagtactggaacagggcggggtaagttccctctttcagaatttgggtgtaagcgtcacaccaatccagcggattgtgttgtctggagagaacggactcaaaattgacatccatgttatcattccatatgaaggtctcagtggagaccaaatggggcagatcgagaagattttcaaggtagtttacccagtcgacgatcaccacttcaaagtcattctccactatggcacacttgttatcgacggagtaactcctaatatgattgattactttggtcgcccgtatgagggcatcgcagtgtttgatggcaaaaagatcaccgtaacaggaacgttgtggaatgggaacaagataatcgacgagagattgataaatccagacgggtcactcctgttcagggttacaattaacggcgtcacaggatggagactctgtgaacgaatactggccacaaatttttcactcctgaagcaggccggagacgtggaggaaaacccagggcccgtgagcaagggcgaggagctgttcaccggggtggtgcccatcctggtcgagctggacggcgacgtaaacggccacaagttcagcgtgtccggcgagggcgagggcgatgccacctacggcaagctgaccctgaagttcatctgcaccaccggcaagctgcccgtgccctggcccaccctcgtgaccaccctgacctacggcgtgcagtgcttcagccgctaccccgaccacatgaagcagcacgacttcttcaagtccgccatgcccgaaggctacgtccaggagcgcaccatcttcttcaaggacgacggcaactacaagacccgcgccgaggtgaagttcgagggcgacaccctggtgaaccgcatcgagctgaagggcatcgacttcaaggaggacggcaacatcctggggcacaagctggagtacaactacaacagccacaacgtctatatcatggccgacaagcagaagaacggcatcaaggtgaacttcaagatccgccacaacatcgaggacggcagcgtgcagctcgccgaccactaccagcagaacacccccatcggcgacggccccgtgctgctgcccgacaaccactacctgagcacccagtccgccctgagcaaagaccccaacgagaagcgcgatcacatggtcctgctggagttcgtgaccgccgccgggatcactctcggcatggacgagctgtacaagggaggaggaagcccgaagaagaagagaaaggtctaacctcgactgtgccttctagttgccagccatctgttgtttgcccctcccccgtgccttccttgaccctggaaggtgccactcccactgtcctttcctaataaaatgaggaaattgcatcgcattgtctgagtaggtgtcattctattctggggggtggggtggggcaggacagcaagggggaggattgggaagacaatagcaggcatgctggggatgcggtgggctctatggcttctgaggcggaaagaaccagctggggctctagggggtatccccaaaaaacctcccacacctccccctgaacctgaaacataaaatgaatgcaattgttgttgttaacttgtttattgcagcttataatggttacaaataaagcaatagcatcacaaatttcacaaataaagcatttttttcactgcattctagttgtggtttgtccaaactcatcaatgtatcttatcatgtctgttacaccttcctcttcttcttggggctgccgccgcccttgtacagctcgtccatgcccagggtgatgccggcggcggtcacgaactccagcagcaccatgtggtccctcttctcgttggggtccttgctcagggcgctctgggtgctcaggtagtggttgtcgggcagcagcacggggccgtcgccgatgggggtgttctgctggtagtggtcggccagctgcacgctgccgtcctcgatgttgtgcctgatcttgaagttcaccttgatgccgttcttctgcttgtcggccatgatgtacacgttgtggctgttgtagttgtactccagcttgtggcccaggatgttgccgtcctccttgaagtcgatgcccttcagctcgatcctgttcaccagggtgtcgccctcgaacttcacctcggccctggtcttgtagttgccgtcgtccttgaagaagatggtcctctcctgcacgtagccctcgggcatggcgctcttgaagaagtcgtgctgcttcatgtggtcggggtacctgctgaagcactgcacgccgtaggtcagggtggtcaccagggtgggccagggcacgggcagcttgccggtggtgcagatgaacttcagggtcagcttgccgtaggtggcgtcgccctcgccctcgccgctcacgctgaacttgtggccgttcacgtcgccgtccagctccaccaggatgggcaccacgccggtgaacagctcctcgcccttgctcacggggccggggttctcctccacgtcgccggcctgcttcagcaggctgaagttggtggccaggatcctctcgcacagcctccagccggtcacgccgttgatggtcaccctgaacagcaggctgccgtcggggttgatcagcctctcgtcgatgatcttgttgccgttccacagggtgccggtcacggtgatcttcttgccgtcgaacacggcgatgccctcgtagggcctgccgaagtagtcgatcatgttgggggtcacgccgtcgatcaccagggtgccgtagtgcaggatcaccttgaagtggtggtcgtccacggggtacaccaccttgaaaatcttctcgatctggcccatctggtcgccgctcaggccctcgtaggggatgatcacgtggatgtcgatcttcaggccgttctcgccgctcagcacgatcctctggatgggggtcacgctcacgcccaggttctggaacaggctgctcacgccgccctgctccagcacctggtccaggttgtagccggcggtctgcctccagtcgcccacgaagtcctccagggtgaacacggcctcctcgaagctgcacttctcctccatgcactccctctccaggttgccctgcacgaactcctccagcttgccgctgttgtacctcttgggcctgttcaggatcttgttggcgttctcgtggtccaggaa

SEQ ID NO: 280 - DNA, 3636 bp, synthetic construct
  source 1..3636: mol_type = other DNA; note = Description of Artificial Sequence: Synthetic polynucleotide
ttggccactccctctctgcgcgctcgctcgctcactgaggccgggcgaccaaaggtcgcccgacgcccgggctttgcccgggcggcctcagtgagcgagcgagcgcgcagagagggagtggccaactccatcactaggggttcctagatctcttaggtcagtgaagagaagaacaaaaagcagcatattacagttagttgtcttcatcaatctttaaatatgttgtgtggtttttctctccctgtttccacagtttttcttgatcatgaaaacgccaacaaaattctgaatcggccaaagaggtataattcaggtaaattggaagagtttgttcaagggaaccttgagagagaatgtatggaagaaaagtgtagttttgaagaagcacgagaagtttttgaaaacactgaaagaacaactgaattttggaagcagtatgttgatggagatcagtgtgagtccaatccatgtttaaatggcggcagttgcaaggatgacattaattcctatgaatgttggtgtccctttggatttgaaggaaagaactgtgaattagatgtaacatgtaacattaagaatggcagatgcgagcagttttgtaaaaatagtgctgataacaaggtggtttgctcctgtactgagggatatcgacttgcagaaaaccagaagtcctgtgaaccagcagtgccatttccatgtggaagagtttctgtttcacaaacttctaagctcacccgtgctgagactgtttttcctgatgtggactatgtaaattctactgaagctgaaaccattttggataacatcactcaaagcacccaatcatttaatgacttcactcgggttgttggtggagaagatgccaaaccaggtcaattcccttggcaggttgttttgaatggtaaagttgatgcattctgtggaggctctatcgttaatgaaaaatggattgtaactgctgcccactgtgttgaaactggtgttaaaattacagttgtcgcaggtgaacataatattgaggagacagaacatacagagcaaaagcgaaatgtgattcgaattattcctcaccacaactacaatgcagctattaataagtacaaccatgacattgcccttctggaactggacgaacccttagtgctaaacagctacgttacacctatttgcattgctgacaaggaatacacgaacatcttcctcaaatttggatctggctatgtaagtggctggggaagagtcttccacaaagggagatcagctttagttcttcagtaccttagagttccacttgttgaccgagccacatgtcttctatctacaaagttcaccatctataacaacatgttctgtgctggcttccatgaaggaggtagagattcatgtcaaggagatagtgggggaccccatgttactgaagtggaagggaccagtttcttaactggaattattagctggggtgaagagtgtgcaatgaaaggcaaatatggaatatataccaaggtctcccggtatgtcaactggattaaggaaaaaacaaagctcactgtcagcggatggagactgttcaagaagatcagctaacctcgactgtgccttctagttgccagccatctgttgtttgcccctcccccgtgccttccttgaccctggaaggtgccactcccactgtcctttcctaataaaatgaggaaattgcatcgcattgtctgagtaggtgtcattctattctggggggtggggtggggcaggacagcaagggggaggattgggaagacaatagcaggcatgctggggatgcggtgggctctatggcttctgaggcggaaagaaccagctggggctctagggggtatccccaaaaaacctcccacacctccccctgaacctgaaacataaaatgaatgcaattgttgttgttaacttgtttattgcagcttataatggttacaaataaagcaatagcatcacaaatttcacaaataaagcatttttttcactgcattctagttgtggtttgtccaaactcatcaatgtatcttatcatgtctgttaggaaatcttcttaaacagccgccagccgctcacggtgagcttagtcttttcttttatccaattcacgtagcgagagaccttcgtatagatgccatatttccccttcatcgcacattcctccccccaacttattatcccggtcaagaaacttgttccttcgacttcagtgacgtgtggtccacctgaatcaccttggcatgagtcgcgaccgccctcgtgaaacccagcacaaaacatgttattgtaaatcgtaaatttcgtggacagaagacaggtcgctctatcgaccaacgggacgcgcaaatattgcagaacgagggctgatcgacctttgtggaagacccgcccccacccactcacatatccgctcccaaatttcaagaagatatttgtatattctttatcggctatacaaatcggggtaacataggagttaagtacgagtggctcgtccagctccaggagggctatatcatggttgtacttgtttatagcggcattataattgtgatggggtatgatcctgataacattccttttctgttcagtatgctcagtttcttcaatgttgtgttcgccagccacgaccgtaatcttaacccccgtctcgacacagtgtgcggccgttacaatccacttttcattgactatggagcccccacaaaacgcgtcgacttttccgttgagcaccacctgccatggaaattggccaggtttagcgtcctcgcccccgacaaccctagtaaagtcattaaatgactgtgtggattgtgttatattatcaagaatcgtttcggcttcagtagagttaacgtagtccacatcgggaaaaactgtctcggcccttgtcaactttgatgtctgggacacacttacccgaccgcacgggaagggcaccgccggttcacagctcttttgattctcagcgagccggtagccctcagtgcaactacacacaactttgttgtcggcggaatttttacagaattgctcgcatcgtccatttttaatgttgcaggtgacgtccaactcgcagttttttccttcaaaaccaaaagggcaccaacactcgtaggaatttatatcgtctttacaactccccccattcagacatggattagattcgcattggtccccatcgacatattgcttccagaactcagtggtccgttctgtattctcaaacacctcgcgcgcttcttcaaaactgcatttttcctccatacactctcgctccaagttcccttgcacgaattcttcaagctttcctgagttataccttttaggccggttaagtatcttattcgcgttttcgtggtccagaaaaactgtggaaacagggagagaaaaaccacacaacatatttaaagattgatgaagacaactaactgtaatatgctgctttttgttcttctcttcactgacctaagagatctaggaacccctagtgatggagttggccactccctctctgcgcgctcgctcgctcactgaggccgcccgggcaaagcccgggcgtcgggcgacctttggtcgcccggcctcagtgagcgagcgagcgcgcagagagggagtggccaa

SEQ ID NO: 281 - DNA, 1954 bp, synthetic construct
  source 1..1954: mol_type = other DNA; note = Description of Artificial Sequence: Synthetic polynucleotide
ggccactccctctctgcgcgctcgctcgctcactgaggccgggcgaccaaaggtcgcccgacgcccgggctttgcccgggcggcctcagtgagcgagcgagcgcgcagagagggagtggccaactccatcactaggggttcctggaggggtggagtcgtgataggtcagtgaagagaagaacaaaaagcagcatattacagttagttgtcttcatcaatctttaaatatgttgtgtggtttttctctccctgtttccacagtttttcttgatcatgaaaacgccaacaaaattctgaatcggccaaagaggtataattcaggtaaattggaagagtttgttcaagggaaccttgagagagaatgtatggaagaaaagtgtagttttgaagaagcacgagaagtttttgaaaacactgaaagaacaactgaattttggaagcagtatgttgatggagatcagtgtgagtccaatccatgtttaaatggcggcagttgcaaggatgacattaattcctatgaatgttggtgtccctttggatttgaaggaaagaactgtgaattagatgtaacatgtaacattaagaatggcagatgcgagcagttttgtaaaaatagtgctgataacaaggtggtttgctcctgtactgagggatatcgacttgcagaaaaccagaagtcctgtgaaccagcagtgccatttccatgtggaagagtttctgtttcacaaacttctaagctcacccgtgctgagactgtttttcctgatgtggactatgtaaattctactgaagctgaaaccattttggataacatcactcaaagcacccaatcatttaatgacttcactcgggttgttggtggagaagatgccaaaccaggtcaattcccttggcaggttgttttgaatggtaaagttgatgcattctgtggaggctctatcgttaatgaaaaatggattgtaactgctgcccactgtgttgaaactggtgttaaaattacagttgtcgcaggtgaacataatattgaggagacagaacatacagagcaaaagcgaaatgtgattcgaattattcctcaccacaactacaatgcagctattaataagtacaaccatgacattgcccttctggaactggacgaacccttagtgctaaacagctacgttacacctatttgcattgctgacaaggaatacacgaacatcttcctcaaatttggatctggctatgtaagtggctggggaagagtcttccacaaagggagatcagctttagttcttcagtaccttagagttccacttgttgaccgagccacatgtcttctatctacaaagttcaccatctataacaacatgttctgtgctggcttccatgaaggaggtagagattcatgtcaaggagatagtgggggaccccatgttactgaagtggaagggaccagtttcttaactggaattattagctggggtgaagagtgtgcaatgaaaggcaaatatggaatatataccaaggtatcccggtatgtcaactggattaaggaaaaaacaaagctcacttaacctcgactgtgccttctagttgccagccatctgttgtttgcccctcccccgtgccttccttgaccctggaaggtgccactcccactgtcctttcctaataaaatgaggaaattgcatcgcattgtctgagtaggtgtcattctattctggggggtggggtggggcaggacagcaagggggaggattgggaagacaatagcaggcatgctggggatgcggtgggctctatggcttctgaggcggaaagaaccagctggggctctagggggtatccccactagtccactccctctctgcgcgctcgctcgctcactgaggccgggcgaccaaaggtcgcccgacgcccgggctttgcccgggcggcctcagtgagcgagcgagcgcgcagagaggga

SEQ ID NO: 282 - DNA, 2359 bp, synthetic construct
  source 1..2359: mol_type = other DNA; note = Description of Artificial Sequence: Synthetic polynucleotide
ggccactccctctctgcgcgctcgctcgctcactgaggccgggcgaccaaaggtcgcccgacgcccgggctttgcccgggcggcctcagtgagcgagcgagcgcgcagagagggagtggccaactccatcactaggggttcctggaggggtggagtcgtgacctaggtcgtctccggctctgctttttccaggggtgtgtttcgccgagaagcacgtaagagttttatgttttttcatctctgcttgtatttttctagtaatggaagcctggtattttaaaatagttaaattttcctttagtgctgatttctagattattattactgttgttgttgttattattgtcattatttgcatctgagaactaggtcagtgaagagaagaacaaaaagcagcatattacagttagttgtcttcatcaatctttaaatatgttgtgtggtttttctctccctgtttccacagtttttcttgatcatgaaaacgccaacaaaattctgaatcggccaaagaggtataattcaggtaaattggaagagtttgttcaagggaaccttgagagagaatgtatggaagaaaagtgtagttttgaagaagcacgagaagtttttgaaaacactgaaagaacaactgaattttggaagcagtatgttgatggagatcagtgtgagtccaatccatgtttaaatggcggcagttgcaaggatgacattaattcctatgaatgttggtgtccctttggatttgaaggaaagaactgtgaattagatgtaacatgtaacattaagaatggcagatgcgagcagttttgtaaaaatagtgctgataacaaggtggtttgctcctgtactgagggatatcgacttgcagaaaaccagaagtcctgtgaaccagcagtgccatttccatgtggaagagtttctgtttcacaaacttctaagctcacccgtgctgagactgtttttcctgatgtggactatgtaaattctactgaagctgaaaccattttggataacatcactcaaagcacccaatcatttaatgacttcactcgggttgttggtggagaagatgccaaaccaggtcaattcccttggcaggttgttttgaatggtaaagttgatgcattctgtggaggctctatcgttaatgaaaaatggattgtaactgctgcccactgtgttgaaactggtgttaaaattacagttgtcgcaggtgaacataatattgaggagacagaacatacagagcaaaagcgaaatgtgattcgaattattcctcaccacaactacaatgcagctattaataagtacaaccatgacattgcccttctggaactggacgaacccttagtgctaaacagctacgttacacctatttgcattgctgacaaggaatacacgaacatcttcctcaaatttggatctggctatgtaagtggctggggaagagtcttccacaaagggagatcagctttagttcttcagtaccttagagttccacttgttgaccgagccacatgtcttctatctacaaagttcaccatctataacaacatgttctgtgctggcttccatgaaggaggtagagattcatgtcaaggagatagtgggggaccccatgttactgaagtggaagggaccagtttcttaactggaattattagctggggtgaagagtgtgcaatgaaaggcaaatatggaatatataccaaggtatcccggtatgtcaactggattaaggaaaaaacaaagctcacttaacctcgactgtgccttctagttgccagccatctgttgtttgcccctcccccgtgccttccttgaccctggaaggtgccactcccactgtcctttcctaataaaatgaggaaattgcatcgcattgtctgagtaggtgtcattctattctggggggtggggtggggcaggacagcaagggggaggattgggaagacaatagcaggcatgctggggatgcggtgggctctatggcttctgaggcggaaagaaccagctggggctctagggggtatcccccttaggtggttatattattgatatatttttggtatctttgatgacaataatgggggattttgaaagcttagctttaaatttcttttaattaaaaaaaaatgctaggcagaatgactcaaattacgttggatacagttgaatttattacggtctcatagggcctgcctgctcgaccatgctatactaaaaattaaaagtgtactagtccactccctctctgcgcgctcgctcgctcactgaggccgggcgaccaaaggtcgcccgacgcccgggctttgcccgggcggcctcagtgagcgagcgagcgcgcagagaggga

SEQ ID NO: 283 - DNA, 2925 bp, synthetic construct
  source 1..2925: mol_type = other DNA; note = Description of Artificial Sequence: Synthetic polynucleotide
ttggccactccctctctgcgcgctcgctcgctcactgaggccgggcgaccaaaggtcgcccgacgcccgggctttgcccgggcggcctcagtgagcgagcgagcgcgcagagagggagtggccaactccatcactaggggttcctagatctgattttgaaagcttagctttaaatttcttttaattaaaaaaaaatgctaggcagaatgactcaaattacgttggatacagttgaatttattacggtctcatagggcctgcctgctcgaccatgctatactaaaaattaaaagtgtgtgttactaattttataaatggagtttccatttatatttacctttatttcttatttaccattgtcttagtagatatttacaaacatgacagaaacactaaatcttgagtttgaatgcacagatataaacacttaacgggttttaaaaataataatgttggtgaaaaaatataactttgagtgtagcagagaggaaccattgccaccttcagattttcctgtaacgatcgggaactggcatcttcagggagtagcttaggtcagtgaagagaagaacaaaaagcagcatattacagttagttgtcttcatcaatctttaaatatgttgtgtggtttttctctccctgtttccacagtttttcttgatcatgaaaacgccaacaaaattctgaatcggccaaagaggtttcttgatcatgaaaacgccaacaaaattctgaatcggccaaagaggtataattcaggtaaattggaagagtttgttcaagggaaccttgagagagaatgtatggaagaaaagtgtagttttgaagaagcacgagaagtttttgaaaacactgaaagaacaactgaattttggaagcagtatgttgatggagatcagtgtgagtccaatccatgtttaaatggcggcagttgcaaggatgacattaattcctatgaatgttggtgtccctttggatttgaaggaaagaactgtgaattagatgtaacatgtaacattaagaatggcagatgcgagcagttttgtaaaaatagtgctgataacaaggtggtttgctcctgtactgagggatatcgacttgcagaaaaccagaagtcctgtgaaccagcagtgccatttccatgtggaagagtttctgtttcacaaacttctaagctcacccgtgctgagactgtttttcctgatgtggactatgtaaattctactgaagctgaaaccattttggataacatcactcaaagcacccaatcatttaatgacttcactcgggttgttggtggagaagatgccaaaccaggtcaattcccttggcaggttgttttgaatggtaaagttgatgcattctgtggaggctctatcgttaatgaaaaatggattgtaactgctgcccactgtgttgaaactggtgttaaaattacagttgtcgcaggtgaacataatattgaggagacagaacatacagagcaaaagcgaaatgtgattcgaattattcctcaccacaactacaatgcagctattaataagtacaaccatgacattgcccttctggaactggacgaacccttagtgctaaacagctacgttacacctatttgcattgctgacaaggaatacacgaacatcttcctcaaatttggatctggctatgtaagtggctggggaagagtcttccacaaagggagatcagctttagttcttcagtaccttagagttccacttgttgaccgagccacatgtcttctatctacaaagttcaccatctataacaacatgttctgtgctggcttccatgaaggaggtagagattcatgtcaaggagatagtgggggaccccatgttactgaagtggaagggaccagtttcttaactggaattattagctggggtgaagagtgtgcaatgaaaggcaaatatggaatatataccaaggtatcccggtatgtcaactggattaaggaaaaaacaaagctcacttaacctcgactgtgccttctagttgccagccatctgttgtttgcccctcccccgtgccttccttgaccctggaaggtgccactcccactgtcctttcctaataaaatgaggaaattgcatcgcattgtctgagtaggtgtcattctattctggggggtggggtggggcaggacagcaagggggaggattgggaagacaatagcaggcatgctggggatgcggtgggctctatggcttctgaggcggaaagaaccagctggggctctagggggtatccccgtgagatcgcccatcggtataatgatttgggagaacaacatttcaaaggcctgtaagttataatgctgaaagcccacttaatatttctggtagtattagttaaagttttaaaacacctttttccaccttgagtgtgagaattgtagagcagtgctgtccagtagaaatgtgtgcattgacagaaagactgtggatctgtgctgagcaatgtggcagccagagatcacaaggctatcaagcactttgcacatggcaagtgtaactgagaagcacacattcaaataatagttaattttaattgaatgtatctagccatgtgtggctagtagctcctttcctggagagagaatctggagcccacatctaacttgttaagtctggaatcttattttttatttctggaaaggtctatgaactatagttttgggggcagctcacttactaacttttaatgcaataagaatctcatggtatcttgagaacattattttgtctctttgtagatctaggaacccctagtgatggagttggccactccctctctgcgcgctcgctcgctcactgaggccgcccgggcaaagcccgggcgtcgggcgacctttggtcgcccggcctcagtgagcgagcgagcgcgcagagagggagtggccaa

SEQ ID NO: 284 - DNA, 3477 bp, synthetic construct
  source 1..3477: mol_type = other DNA; note = Description of Artificial Sequence: Synthetic polynucleotide
ttggccactccctctctgcgcgctcgctcgctcactgaggccgggcgaccaaaggtcgcccgacgcccgggctttgcccgggcggcctcagtgagcgagcgagcgcgcagagagggagtggccaactccatcactaggggttcctagatcttagcctctggcaaaatgaagtgggtaacctttctcctcctcctcttcgtctccggctctgctttttccaggggtgtgtttcgccgagaagcacgtaagagttttatgttttttcatctctgcttgtatttttctagtaatggaagcctggtattttaaaatagttaaattttcctttagtgctgatttctagattattattactgttgttgttgttattattgtcattatttgcatctgagaacccttaggtggttatattattgatatatttttggtatctttgatgacaataatgggggattttgaaagcttagctttaaatttcttttaattaaaaaaaaatgctaggcagaatgactcaaattacgttggatacagttgaatttattacggtctcatagggcctgcctgctcgaccatgctatactaaaaattaaaagtgtgtgttactaattttataaatggagtttccatttatatttacctttatttcttatttaccattgtcttagtagatatttacaaacatgacagaaacactaaatcttgagtttgaatgcacagatataaacacttaacgggttttaaaaataataatgttggtgaaaaaatataactttgagtgtagcagagaggaaccattgccaccttcagattttcctgtaacgatcgggaactggcatcttcagggagtagcttaggtcagtgaagagaagaacaaaaagcagcatattacagttagttgtcttcatcaatctttaaatatgttgtgtggtttttctctccctgtttccacagtttttcttgatcatgaaaacgccaacaaaattctgaatcggccaaagaggtataattcaggtaaattggaagagtttgttcaagggaaccttgagagagaatgtatggaagaaaagtgtagttttgaagaagcacgagaagtttttgaaaacactgaaagaacaactgaattttggaagcagtatgttgatggagatcagtgtgagtccaatccatgtttaaatggcggcagttgcaaggatgacattaattcctatgaatgttggtgtccctttggatttgaaggaaagaactgtgaattagatgtaacatgtaacattaagaatggcagatgcgagcagttttgtaaaaatagtgctgataacaaggtggtttgctcctgtactgagggatatcgacttgcagaaaaccagaagtcctgtgaaccagcagtgccatttccatgtggaagagtttctgtttcacaaacttctaagctcacccgtgctgagactgtttttcctgatgtggactatgtaaattctactgaagctgaaaccattttggataacatcactcaaagcacccaatcatttaatgacttcactcgggttgttggtggagaagatgccaaaccaggtcaattcccttggcaggttgttttgaatggtaaagttgatgcattctgtggaggctctatcgttaatgaaaaatggattgtaactgctgcccactgtgttgaaactggtgttaaaattacagttgtcgcaggtgaacataatattgaggagacagaacatacagagcaaaagcgaaatgtgattcgaattattcctcaccacaactacaatgcagctattaataagtacaaccatgacattgcccttctggaactggacgaacccttagtgctaaacagctacgttacacctatttgcattgctgacaaggaatacacgaacatcttcctcaaatttggatctggctatgtaagtggctggggaagagtcttccacaaagggagatcagctttagttcttcagtaccttagagttccacttgttgaccgagccacatgtcttctatctacaaagttcaccatctataacaacatgttctgtgctggcttccatgaaggaggtagagattcatgtcaaggagatagtgggggaccccatgttactgaagtggaagggaccagtttcttaactggaattattagctggggtgaagagtgtgcaatgaaaggcaaatatggaatatataccaaggtatcccggtatgtcaactggattaaggaaaaaacaaagctcacttaacctcgactgtgccttctagttgccagccatctgttgtttgcccctcccccgtgccttccttgaccctggaaggtgccactcccactgtcctttcctaataaaatgaggaaattgcatcgcattgtctgagtaggtgtcattctattctggggggtggggtggggcaggacagcaagggggaggattgggaagacaatagcaggcatgctggggatgcggtgggctctatggcttctgaggcggaaagaaccagctggggctctagggggtatccccgtgagatcgcccatcggtataatgatttgggagaacaacatttcaaaggcctgtaagttataatgctgaaagcccacttaatatttctggtagtattagttaaagttttaaaacacctttttccaccttgagtgtgagaattgtagagcagtgctgtccagtagaaatgtgtgcattgacagaaagactgtggatctgtgctgagcaatgtggcagccagagatcacaaggctatcaagcactttgcacatggcaagtgtaactgagaagcacacattcaaataatagttaattttaattgaatgtatctagccatgtgtggctagtagctcctttcctggagagagaatctggagcccacatctaacttgttaagtctggaatcttattttttatttctggaaaggtctatgaactatagttttgggggcagctcacttactaacttttaatgcaataagaatctcatggtatcttgagaacattattttgtctctttgtagtactgaaaccttatacatgtgaagtaaggggtctatacttaagtcacatctccaaccttagtaatgttttaatgtagtaaaaaaatgagtaattaatttatttttagaaggtcaatagtatcatgtattccaaataacagaggtatatggttagaaaagaaacaattcaaaggacttatataatatctagccttgacaatgaataaatttagagagtagtttgcctgtttgcctcatgttcataaatctattgacacatatgtgcatctgcacttcagcatggtagaagtccatattcagatctaggaacccctagtgatggagttggccactccctctctgcgcgctcgctcgctcactgaggccgcccgggcaaagcccgggcgtcgggcgacctttggtcgcccggcctcagtgagcgagcgagcgcgcagagagggagtggccaa

SEQ ID NO: 285 - DNA, 2476 bp, synthetic construct
  source 1..2476: mol_type = other DNA; note = Description of Artificial Sequence: Synthetic polynucleotide
ttggccactccctctctgcgcgctcgctcgctcactgaggccgggcgaccaaaggtcgcccgacgcccgggctttgcccgggcggcctcagtgagcgagcgagcgcgcagagagggagtggccaactccatcactaggggttcctagatctaagtatattagagcgagtctttctgcacacagatcacctttcctatcaaccccactagcctctggcaaaatgaagtgggtaacctttctcctcctcctcttcgtctccggctctgctttttccaggggtgtgtttcgccgagaagcacgtaagagttttatgttttttcatctctgcttgtatttttctagtaatggaagcctggtattttaaaatagttaaattttcctttagtgctgatttctagattattattactgttgttgttgttattattgtcattatttgcatctgagaacctttttcttgatcatgaaaacgccaacaaaattctgaatcggccaaagaggtataattcaggtaaattggaagagtttgttcaagggaaccttgagagagaatgtatggaagaaaagtgtagttttgaagaagcacgagaagtttttgaaaacactgaaagaacaactgaattttggaagcagtatgttgatggagatcagtgtgagtccaatccatgtttaaatggcggcagttgcaaggatgacattaattcctatgaatgttggtgtccctttggatttgaaggaaagaactgtgaattagatgtaacatgtaacattaagaatggcagatgcgagcagttttgtaaaaatagtgctgataacaaggtggtttgctcctgtactgagggatatcgacttgcagaaaaccagaagtcctgtgaaccagcagtgccatttccatgtggaagagtttctgtttcacaaacttctaagctcacccgtgctgagactgtttttcctgatgtggactatgtaaattctactgaagctgaaaccattttggataacatcactcaaagcacccaatcatttaatgacttcactcgggttgttggtggagaagatgccaaaccaggtcaattcccttggcaggttgttttgaatggtaaagttgatgcattctgtggaggctctatcgttaatgaaaaatggattgtaactgctgcccactgtgttgaaactggtgttaaaattacagttgtcgcaggtgaacataatattgaggagacagaacatacagagcaaaagcgaaatgtgattcgaattattcctcaccacaactacaatgcagctattaataagtacaaccatgacattgcccttctggaactggacgaacccttagtgctaaacagctacgttacacctatttgcattgctgacaaggaatacacgaacatcttcctcaaatttggatctggctatgtaagtggctggggaagagtcttccacaaagggagatcagctttagttcttcagtaccttagagttccacttgttgaccgagccacatgtcttctatctacaaagttcaccatctataacaacatgttctgtgctggcttccatgaaggaggtagagattcatgtcaaggagatagtgggggaccccatgttactgaagtggaagggaccagtttcttaactggaattattagctggggtgaagagtgtgcaatgaaaggcaaatatggaatatataccaaggtatcccggtatgtcaactggattaaggaaaaaacaaagctcacttaacctcgactgtgccttctagttgccagccatctgttgtttgcccctcccccgtgccttccttgaccctggaaggtgccactcccactgtcctttcctaataaaatgaggaaattgcatcgcattgtctgagtaggtgtcattctattctggggggtggggtggggcaggacagcaagggggaggattgggaagacaatagcaggcatgctggggatgcggtgggctctatggcttctgaggcggaaagaaccagctggggctctagggggtatcccccttaggtggttatattattgatatatttttggtatctttgatgacaataatgggggattttgaaagcttagctttaaatttcttttaattaaaaaaaaatgctaggcagaatgactcaaattacgttggatacagttgaatttattacggtctcatagggcctgcctgctcgaccatgctatactaaaaattaaaagtgtgtgttactaattttataaatggagtttccatttatatttacctttatttcttatttaccattgtcttagtagatatttacaaacatgacagaaacactaaagatctaggaacccctagtgatggagttggccactccctctctgcgcgctcgctcgctcactgaggccgcccgggcaaagcccgggcgtcgggcgacctttggtcgcccggcctcagtgagcgagcgagcgcgcagagagggagtggccaa

SEQ ID NO: 286 - DNA, 4175 bp, synthetic construct
  source 1..4175: mol_type = other DNA; note = Description of Artificial Sequence: Synthetic polynucleotide
ttggccactccctctctgcgcgctcgctcgctcactgaggccgggcgaccaaaggtcgcccgacgcccgggctttgcccgggcggcctcagtgagcgagcgagcgcgcagagagggagtggccaactccatcactaggggttcctagatctaagtatattagagcgagtctttctgcacacagatcacctttcctatcaaccccactagcctctggcaaaatgaagtgggtaacctttctcctcctcctcttcgtctccggctctgctttttccaggggtgtgtttcgccgagaagcacgtaagagttttatgttttttcatctctgcttgtatttttctagtaatggaagcctggtattttaaaatagttaaattttcctttagtgctgatttctagattattattactgttgttgttgttattattgtcattatttgcatctgagaacctttttcttgatcatgaaaacgccaacaaaattctgaatcggccaaagaggtataattcaggtaaattggaagagtttgttcaagggaaccttgagagagaatgtatggaagaaaagtgtagttttgaagaagcacgagaagtttttgaaaacactgaaagaacaactgaattttggaagcagtatgttgatggagatcagtgtgagtccaatccatgtttaaatggcggcagttgcaaggatgacattaattcctatgaatgttggtgtccctttggatttgaaggaaagaactgtgaattagatgtaacatgtaacattaagaatggcagatgcgagcagttttgtaaaaatagtgctgataacaaggtggtttgctcctgtactgagggatatcgacttgcagaaaaccagaagtcctgtgaaccagcagtgccatttccatgtggaagagtttctgtttcacaaacttctaagctcacccgtgctgagactgtttttcctgatgtggactatgtaaattctactgaagctgaaaccattttggataacatcactcaaagcacccaatcatttaatgacttcactcgggttgttggtggagaagatgccaaaccaggtcaattcccttggcaggttgttttgaatggtaaagttgatgcattctgtggaggctctatcgttaatgaaaaatggattgtaactgctgcccactgtgttgaaactggtgttaaaattacagttgtcgcaggtgaacataatattgaggagacagaacatacagagcaaaagcgaaatgtgattcgaattattcctcaccacaactacaatgcagctattaataagtacaaccatgacattgcccttctggaactggacgaacccttagtgctaaacagctacgttacacctatttgcattgctgacaaggaatacacgaacatcttcctcaaatttggatctggctatgtaagtggctggggaagagtcttccacaaagggagatcagctttagttcttcagtaccttagagttccacttgttgaccgagccacatgtcttctatctacaaagttcaccatctataacaacatgttctgtgctggcttccatgaaggaggtagagattcatgtcaaggagatagtgggggaccccatgttactgaagtggaagggaccagtttcttaactggaattattagctggggtgaagagtgtgcaatgaaaggcaaatatggaatatataccaaggtatcccggtatgtcaactggattaaggaaaaaacaaagctcacttaacctcgactgtgccttctagttgccagccatctgttgtttgcccctcccccgtgccttccttgaccctggaaggtgccactcccactgtcctttcctaataaaatgaggaaattgcatcgcattgtctgagtaggtgtcattctattctggggggtggggtggggcaggacagcaagggggaggattgggaagacaatagcaggcatgctggggatgcggtgggctctatggcttctgaggcggaaagaaccagctggggctctagggggtatcccccttaggtggttatattattgatatatttttggtatctttgatgacaataatgggggattttgaaagcttagctttaaatttcttttaattaaaaaaaaatgctaggcagaatgactcaaattacgttggatacagttgaatttattacggtctcatagggcctgcctgctcgaccatgctatactaaaaattaaaagtgtgtgttactaattttataaatggagtttccatttatatttacctttatttcttatttaccattgtcttagtagatatttacaaacatgacagaaacactaaatcttgagtttgaatgcacagatataaacacttaacgggttttaaaaataataatgttggtgaaaaaatataactttgagtgtagcagagaggaaccattgccaccttcagattttcctgtaacgatcgggaactggcatcttcagggagtagcttaggtcagtgaagagaagaacaaaaagcagcatattacagttagttgtcttcatcaatctttaaatatgttgtgtggtttttctctccctgtttccacagacaagagtgagatcgcccatcggtataatgatttgggagaacaacatttcaaaggcctgtaagttataatgctgaaagcccacttaatatttctggtagtattagttaaagttttaaaacacctttttccaccttgagtgtgagaattgtagagcagtgctgtccagtagaaatgtgtgcattgacagaaagactgtggatctgtgctgagcaatgtggcagccagagatcacaaggctatcaagcactttgcacatggcaagtgtaactgagaagcacacattcaaataatagttaattttaattgaatgtatctagccatgtgtggctagtagctcctttcctggagagagaatctggagcccacatctaacttgttaagtctggaatcttattttttatttctggaaaggtctatgaactatagttttgggggcagctcacttactaacttttaatgcaataagatccatggtatcttgagaacattattttgtctctttgtagtactgaaaccttatacatgtgaagtaaggggtctatacttaagtcacatctccaaccttagtaatgttttaatgtagtaaaaaaatgagtaattaatttatttttagaaggtcaatagtatcatgtattccaaataacagaggtatatggttagaaaagaaacaattcaaaggacttatataatatctagccttgacaatgaataaatttagagagtagtttgcctgtttgcctcatgttcataaatctattgacacatatgtgcatctgcacttcagcatggtagaagtccatattcctttgcttggaaaggcaggtgttcccattacgcctcagagaatagctgacgggaagaggctttctagatagttgtatgaaagatatacaaaatctcgcaggtatacacaggcatgatttgctggttgggagagccacttgcctcatactgaggtttttgtgtctgcttttcagagtcctgattgccttttcccagtatctccagaaatgctcatacgatgagcatgccaaattagtgcaggaagtaacagactttgcaaagacgtgtgttgccgatgagtctgccgccaactgtgacaaatcccttgtgagtaccttctgattttgtggatctactttcctgctttctggaactctgtttcaaagccaatcatgactccatcacttaaggccccgggaacactgtggcagagggcagcagagagattgataaagccagggtgatgggaattttctgtgggactccatttcatagtaattgcagaagctacaatacactcaaaaagtctcaccacatgactgcccaaatgggagcttgacagtgacagtgacagtagatatgccaaagtggatgagggaaagaccacaagagctaaaccctgtaaaaagaactgtaggcaactaaggaatgcagagagaaagatctaggaacccctagtgatggagttggccactccctctctgcgcgctcgctcgctcactgaggccgcccgggcaaagcccgggcgtcgggcgacctttggtcgcccggcctcagtgagcgagcgagcgcgcagagagggagtggccaa

SEQ ID NO: 287 - DNA, 3675 bp, synthetic construct
  source 1..3675: mol_type = other DNA; note = Description of Artificial Sequence: Synthetic polynucleotide
ttggccactccctctctgcgcgctcgctcgctcactgaggccgggcgaccaaaggtcgcccgacgcccgggctttgcccgggcggcctcagtgagcgagcgagcgcgcagagagggagtggccaactccatcactaggggttcctagatctaagtatattagagcgagtctttctgcacacagatcacctttcctatcaaccccactagcctctggcaaaatgaagtgggtaacctttctcctcctcctcttcgtctccggctctgctttttccaggggtgtgtttcgccgagaagcacgtaagagttttatgttttttcatctctgcttgtatttttctagtaatggaagcctggtattttaaaatagttaaattttcctttagtgctgatttctagattattattactgttgttgttgttattattgtcattatttgcatctgagaacctttttcttgatcatgaaaacgccaacaaaattctgaatcggccaaagaggtataattcaggtaaattggaagagtttgttcaagggaaccttgagagagaatgtatggaagaaaagtgtagttttgaagaagcacgagaagtttttgaaaacactgaaagaacaactgaattttggaagcagtatgttgatggagatcagtgtgagtccaatccatgtttaaatggcggcagttgcaaggatgacattaattcctatgaatgttggtgtccctttggatttgaaggaaagaactgtgaattagatgtaacatgtaacattaagaatggcagatgcgagcagttttgtaaaaatagtgctgataacaaggtggtttgctcctgtactgagggatatcgacttgcagaaaaccagaagtcctgtgaaccagcagtgccatttccatgtggaagagtttctgtttcacaaacttctaagctcacccgtgctgagactgtttttcctgatgtggactatgtaaattctactgaagctgaaaccattttggataacatcactcaaagcacccaatcatttaatgacttcactcgggttgttggtggagaagatgccaaaccaggtcaattcccttggcaggttgttttgaatggtaaagttgatgcattctgtggaggctctatcgttaatgaaaaatggattgtaactgctgcccactgtgttgaaactggtgttaaaattacagttgtcgcaggtgaacataatattgaggagacagaacatacagagcaaaagcgaaatgtgattcgaattattcctcaccacaactacaatgcagctattaataagtacaaccatgacattgcccttctggaactggacgaacccttagtgctaaacagctacgttacacctatttgcattgctgacaaggaatacacgaacatcttcctcaaatttggatctggctatgtaagtggctggggaagagtcttccacaaagggagatcagctttagttcttcagtaccttagagttccacttgttgaccgagccacatgtcttctatctacaaagttcaccatctataacaacatgttctgtgctggcttccatgaaggaggtagagattcatgtcaaggagatagtgggggaccccatgttactgaagtggaagggaccagtttcttaactggaattattagctggggtgaagagtgtgcaatgaaaggcaaatatggaatatataccaaggtatcccggtatgtcaactggattaaggaaaaaacaaagctcacttaacctcgactgtgccttctagttgccagccatctgttgtttgcccctcccccgtgccttccttgaccctggaaggtgccactcccactgtcctttcctaataaaatgaggaaattgcatcgcattgtctgagtaggtgtcattctattctggggggtggggtggggcaggacagcaagggggaggattgggaagacaatagcaggcatgctggggatgcggtgggctctatggcttctgaggcggaaagaaccagctggggctctagggggtatcccccttaggtggttatattattgatatatttttggtatctttgatgacaataatgggggattttgaaagcttagctttaaatttcttttaattaaaaaaaaatgctaggcagaatgactcaaattacgttggatacagttgaatttattacggtctcatagggcctgcctgctcgaccatgctatactaaaaattaaaagtgtgtgttactaattttataaatggagtttccatttatatttacctttatttcttatttaccattgtcttagtagatatttacaaacatgacagaaacactaaatcttgagtttgaatgcacagatataaacacttaacgggttttaaaaataataatgttggtgaaaaaatataactttgagtgtagcagagaggaaccattgccaccttcagattttcctgtaacgatcgggaactggcatcttcagggagtagcttaggtcagtgaagagaagaacaaaaagcagcatattacagttagttgtcttcatcaatctttaaatatgttgtgtggtttttctctccctgtttccacagacaagagtgagatcgcccatcggtataatgatttgggagaacaacatttcaaaggcctgtaagttataatgctgaaagcccacttaatatttctggtagtattagttaaagttttaaaacacctttttccaccttgagtgtgagaattgtagagcagtgctgtccagtagaaatgtgtgcattgacagaaagactgtggatctgtgctgagcaatgtggcagccagagatcacaaggctatcaagcactttgcacatggcaagtgtaactgagaagcacacattcaaataatagttaattttaattgaatgtatctagccatgtgtggctagtagctcctttcctggagagagaatctggagcccacatctaacttgttaagtctggaatcttattttttatttctggaaaggtctatgaactatagttttgggggcagctcacttactaacttttaatgcaataagatccatggtatcttgagaacattattttgtctctttgtagtactgaaaccttatacatgtgaagtaaggggtctatacttaagtcacatctccaaccttagtaatgttttaatgtagtaaaaaaatgagtaattaatttatttttagaaggtcaatagtatcatgtattccaaataacagaggtatatggttagaaaagaaacaattcaaaggacttatataatatctagccttgacaatgaataaatttagagagtagtttgcctgtttgcctcatgttcataaatctattgacacatatgtgcatctgcacttcagcatggtagaagtccatattcctttgcttggaaaggcaggtgttcccattacgcctcagagaatagctgacgggaagaggctttctagatagttgtatgaaagatatacaaaatctcgcaggtatacacaggcatgatttgctggttgggagagccacttagatctaggaacccctagtgatggagttggccactccctctctgcgcgctcgctcgctcactgaggccgcccgggcaaagcccgggcgtcgggcgacctttggtcgcccggcctcagtgagcgagcgagcgcgcagagagggagtggccaa

SEQ ID NO: 288-299 - skipped (12 entries)

SEQ ID NO: 300 - RNA, 22 nt, synthetic construct
  source 1..22: mol_type = other RNA; note = Description of Artificial Sequence: Synthetic oligonucleotide
gttttagagctatgctgttttg

SEQ ID NO: 301 - RNA, 80 nt, synthetic construct
  source 1..80: mol_type = other RNA; note = Description of Artificial Sequence: Synthetic oligonucleotide
gttttagagctagaaatagcaagttaaaataaggctagtccgttatcaacttgaaaaagtggcaccgagtcggtgctttt

SEQ ID NO: 302 - RNA, 76 nt, synthetic construct
  source 1..76: mol_type = other RNA; note = Description of Artificial Sequence: Synthetic oligonucleotide
gttttagagctagaaatagcaagttaaaataaggctagtccgttatcaacttgaaaaagtggcaccgagtcggtgc

SEQ ID NO: 303-349 - skipped (47 entries)

SEQ ID NO: 350 - RNA, 100 nt, synthetic construct
  source 1..100: mol_type = other RNA; note = Description of Artificial Sequence: Synthetic polynucleotide
  misc_difference 1: note = 2'-O-methyl modified adenosine, cytidine, uridine, guanosine, unknown or other nucleotide with phosphorothioate linkage
  misc_difference 2: note = 2'-O-methyl modified adenosine, cytidine, uridine, guanosine, unknown or other nucleotide with phosphorothioate linkage
  misc_difference 3: note = 2'-O-methyl modified adenosine, cytidine, uridine, guanosine, unknown or other nucleotide with phosphorothioate linkage
  misc_difference 4: note = a, c, u, g, unknown or other
  misc_difference 5: note = a, c, u, g, unknown or other
  misc_difference 6: note = a, c, u, g, unknown or other
  misc_difference 7: note = a, c, u, g, unknown or other
  misc_difference 8: note = a, c, u, g, unknown or other
  misc_difference 9: note = a, c, u, g, unknown or other
  misc_difference 10: note = a, c, u, g, unknown or other
  misc_difference 11: note = a, c, u, g, unknown or other
  misc_difference 12: note = a, c, u, g, unknown or other
  misc_difference 13: note = a, c, u, g, unknown or other
  misc_difference 14: note = a, c, u, g, unknown or other
  misc_difference 15: note = a, c, u, g, unknown or other
  misc_difference 16: note = a, c, u, g, unknown or other
  misc_difference 17: note = a, c, u, g, unknown or other
  misc_difference 18: note = a, c, u, g, unknown or other
  misc_difference 19: note = a, c, u, g, unknown or other
  misc_difference 20: note = a, c, u, g, unknown or other
  modified_base 29: mod_base = OTHER; note = 2'-O-methyl modified nucleotide
  modified_base 30: mod_base = OTHER; note = 2'-O-methyl modified nucleotide
  modified_base 31: mod_base = OTHER; note = 2'-O-methyl modified nucleotide
  modified_base 32: mod_base = OTHER; note = 2'-O-methyl modified nucleotide
  modified_base 33: mod_base = OTHER; note = 2'-O-methyl modified nucleotide
  modified_base 34: mod_base = OTHER; note = 2'-O-methyl modified nucleotide
  modified_base 35: mod_base = OTHER; note = 2'-O-methyl modified nucleotide
  modified_base 36: mod_base = OTHER; note = 2'-O-methyl modified nucleotide
  modified_base 37: mod_base = OTHER; note = 2'-O-methyl modified nucleotide
  modified_base 38: mod_base = OTHER; note = 2'-O-methyl modified nucleotide
  modified_base 39: mod_base = OTHER; note = 2'-O-methyl modified nucleotide
  modified_base 40: mod_base = OTHER; note = 2'-O-methyl modified nucleotide
  modified_base 69: mod_base = OTHER; note = 2'-O-methyl modified nucleotide
  modified_base 70: mod_base = OTHER; note = 2'-O-methyl modified nucleotide
  modified_base 71: mod_base = OTHER; note = 2'-O-methyl modified nucleotide
  modified_base 72: mod_base = OTHER; note = 2'-O-methyl modified nucleotide
  modified_base 73: mod_base = OTHER; note = 2'-O-methyl modified nucleotide
  modified_base 74: mod_base = OTHER; note = 2'-O-methyl modified nucleotide
  modified_base 75: mod_base = OTHER; note = 2'-O-methyl modified nucleotide
  modified_base 76: mod_base = OTHER; note = 2'-O-methyl modified nucleotide
  modified_base 77: mod_base = OTHER; note = 2'-O-methyl modified nucleotide
  modified_base 78: mod_base = OTHER; note = 2'-O-methyl modified nucleotide
  modified_base 79: mod_base = OTHER; note = 2'-O-methyl modified nucleotide
  modified_base 80: mod_base = OTHER; note = 2'-O-methyl modified nucleotide
  modified_base 81: mod_base = OTHER; note = 2'-O-methyl modified nucleotide
  modified_base 82: mod_base = OTHER; note = 2'-O-methyl modified nucleotide
  modified_base 83: mod_base = OTHER; note = 2'-O-methyl modified nucleotide
  modified_base 84: mod_base = OTHER; note = 2'-O-methyl modified nucleotide
  modified_base 85: mod_base = OTHER; note = 2'-O-methyl modified nucleotide
  modified_base 86: mod_base = OTHER; note = 2'-O-methyl modified nucleotide
  modified_base 87: mod_base = OTHER; note = 2'-O-methyl modified nucleotide
  modified_base 88: mod_base = OTHER; note = 2'-O-methyl modified nucleotide
  modified_base 89: mod_base = OTHER; note = 2'-O-methyl modified nucleotide
  modified_base 90: mod_base = OTHER; note = 2'-O-methyl modified nucleotide
  modified_base 91: mod_base = OTHER; note = 2'-O-methyl modified nucleotide
  modified_base 92: mod_base = OTHER; note = 2'-O-methyl modified nucleotide
  modified_base 93: mod_base = OTHER; note = 2'-O-methyl modified nucleotide
  modified_base 94: mod_base = OTHER; note = 2'-O-methyl modified nucleotide
  modified_base 95: mod_base = OTHER; note = 2'-O-methyl modified nucleotide
  modified_base 96: mod_base = OTHER; note = 2'-O-methyl modified nucleotide
  modified_base 97: mod_base = OTHER; note = 2'-O-methyl modified nucleotide with phosphorothioate linkage
  modified_base 98: mod_base = OTHER; note = 2'-O-methyl modified nucleotide with phosphorothioate linkage
  modified_base 99: mod_base = OTHER; note = 2'-O-methyl modified nucleotide with phosphorothioate linkage
  modified_base 100: mod_base = OTHER; note = 2'-O-methyl modified nucleotide
nnnnnnnnnnnnnnnnnnnngttttagagctagaaatagcaagttaaaataaggctagtccgttatcaacttgaaaaagtggcaccgagtcggtgctttt

SEQ ID NO: 351-599 - skipped (249 entries)

SEQ ID NO: 600 - protein, 7 aa, Simian virus 40
PKKKRKV

SEQ ID NO: 601 - protein, 7 aa, Simian virus 40
PKKKRRV

SEQ ID NO: 602 - protein, 16 aa, unidentified
  source 1..16: note = Description of Unknown: Nucleoplasmin bipartite NLS sequence
KRPAATKKAGQAKKKK

SEQ ID NO: 603-702 - skipped (100 entries)

SEQ ID NO: 703 - DNA, 4104 bp, synthetic construct
  source 1..4104: mol_type = other DNA; note = Description of Artificial Sequence: Synthetic polynucleotide
atggataagaagtactcaatcgggctggatatcggaactaattccgtgggttgggcagtgatcacggatgaatacaaagtgccgtccaagaagttcaaggtcctggggaacaccgatagacacagcatcaagaaaaatctcatcggagccctgctgtttgactccggcgaaaccgcagaagcgacccggctcaaacgtaccgcgaggcgacgctacacccggcggaagaatcgcatctgctatctgcaagagatcttttcgaacgaaatggcaaaggtcgacgacagcttcttccaccgcctggaagaatctttcctggtggaggaggacaagaagcatgaacggcatcctatctttggaaacatcgtcgacgaagtggcgtaccacgaaaagtacccgaccatctaccatctgcggaagaagttggttgactcaactgacaaggccgacctcagattgatctacttggccctcgcccatatgatcaaattccgcggacacttcctgatcgaaggcgatctgaaccctgataactccgacgtggataagcttttcattcaactggtgcagacctacaaccaactgttcgaagaaaacccaatcaatgctagcggcgtcgatgccaaggccatcctgtccgcccggctgtcgaagtcgcggcgcctcgaaaacctgatcgcacagctgccgggagagaaaaagaacggacttttcggcaacttgatcgctctctcactgggactcactcccaatttcaagtccaattttgacctggccgaggacgcgaagctgcaactctcaaaggacacctacgacgacgacttggacaatttgctggcacaaattggcgatcagtacgcggatctgttccttgccgctaagaacctttcggacgcaatcttgctgtccgatatcctgcgcgtgaacaccgaaataaccaaagcgccgcttagcgcctcgatgattaagcggtacgacgagcatcaccaggatctcacgctgctcaaagcgctcgtgagacagcaactgcctgaaaagtacaaggagatcttcttcgaccagtccaagaatgggtacgcagggtacatcgatggaggcgctagccaggaagagttctataagttcatcaagccaatcctggaaaagatggacggaaccgaagaactgctggtcaagctgaacagggaggatctgctccggaaacagagaacctttgacaacggatccattccccaccagatccatctgggtgagctgcacgccatcttgcggcgccaggaggacttttacccattcctcaaggacaaccgggaaaagatcgagaaaattctgacgttccgcatcccgtattacgtgggcccactggcgcgcggcaattcgcgcttcgcgtggatgactagaaaatcagaggaaaccatcactccttggaatttcgaggaagttgtggataagggagcttcggcacaaagcttcatcgaacgaatgaccaacttcgacaagaatctcccaaacgagaaggtgcttcctaagcacagcctcctttacgaatacttcactgtctacaacgaactgactaaagtgaaatacgttactgaaggaatgaggaagccggcctttctgtccggagaacagaagaaagcaattgtcgatctgctgttcaagaccaaccgcaaggtgaccgtcaagcagcttaaagaggactacttcaagaagatcgagtgtttcgactcagtggaaatcagcggggtggaggacagattcaacgcttcgctgggaacctatcatgatctcctgaagatcatcaaggacaaggacttccttgacaacgaggagaacgaggacatcctggaagatatcgtcctgaccttgacccttttcgaggatcgcgagatgatcgaggagaggcttaagacctacgctcatctcttcgacgataaggtcatgaaacaactcaagcgccgccggtacactggttggggccgcctctcccgcaagctgatcaacggtattcgcgataaacagagcggtaaaactatcctggatttcctcaaatcggatggcttcgctaatcgtaacttcatgcaattgatccacgacgacagcctgacctttaaggaggacatccaaaaagcacaagtgtccggacagggagactcactccatgaacacatcgcgaatctggccggttcgccggcgattaagaagggaattctgcaaactgtgaaggtggtcgacgagctggtgaaggtcatgggacggcacaaaccggagaatatcgtgattgaaatggcccgagaaaaccagactacccagaagggccagaaaaactcccgcgaaaggatgaagcggatcgaagaaggaatcaaggagctgggcagccagatcctgaaagagcacccggtggaaaacacgcagctgcagaacgagaagctctacctgtactatttgcaaaatggacgggacatgtacgtggaccaagagctggacatcaatcggttgtctgattacgacgtggaccacatcgttccacagtcctttctgaaggatgactcgatcgataacaaggtgttgactcgcagcgacaagaacagagggaagtcagataatgtgccatcggaggaggtcgtgaagaagatgaagaattactggcggcagctcctgaatgcgaagctgattacccagagaaagtttgacaatctcactaaagccgagcgcggcggactctcagagctggataaggctggattcatcaaacggcagctggtcgagactcggcagattaccaagcacgtggcgcagatcttggactcccgcatgaacactaaatacgacgagaacgataagctcatccgggaagtgaaggtgattaccctgaaaagcaaacttgtgtcggactttcggaaggactttcagttttacaaagtgagagaaatcaacaactaccatcacgcgcatgacgcatacctcaacgctgtggtcggtaccgccctgatcaaaaagtaccctaaacttgaatcggagtttgtgtacggagactacaaggtctacgacgtgaggaagatgatagccaagtccgaacaggaaatcgggaaagcaactgcgaaatacttcttttactcaaacatcatgaactttttcaagactgaaattacgctggccaatggagaaatcaggaagaggccactgatcgaaactaacggagaaacgggcgaaatcgtgtgggacaagggcagggacttcgcaactgttcgcaaagtgctctctatgccgcaagtcaatattgtgaagaaaaccgaagtgcaaaccggcggattttcaaaggaatcgatcctcccaaagagaaatagcgacaagctcattgcacgcaagaaagactgggacccgaagaagtacggaggattcgattcgccgactgtcgcatactccgtcctcgtggtggccaaggtggagaagggaaagagcaaaaagctcaaatccgtcaaagagctgctggggattaccatcatggaacgatcctcgttcgagaagaacccgattgatttcctcgaggcgaagggttacaaggaggtgaagaaggatctgatcatcaaactccccaagtactcactgttcgaactggaaaatggtcggaagcgcatgctggcttcggccggagaactccaaaaaggaaatgagctggccttgcctagcaagtacgtcaacttcctctatcttgcttcgcactacgaaaaactcaaagggtcaccggaagataacgaacagaagcagcttttcgtggagcagcacaagcattatctggatgaaatcatcgaacaaatctccgagttttcaaagcgcgtgatcctcgccgacgccaacctcgacaaagtcctgtcggcctacaataagcatagagataagccgatcagagaacaggccgagaacattatccacttgttcaccctgactaacctgggagccccagccgccttcaagtacttcgatactactatcgatcgcaaaagatacacgtccaccaaggaagttctggacgcgaccctgatccaccaaagcatcactggactctacgaaactaggatcgatctgtcgcagctgggtggcgat

SEQ ID NO: 704 - DNA, 4140 bp, synthetic construct
  source 1..4140: mol_type = other DNA; note = Description of Artificial Sequence: Synthetic polynucleotide
atggacaagaagtacagcatcggactggacatcggaacaaacagcgtcggatgggcagtcatcacagacgaatacaaggtcccgagcaagaagttcaaggtcctgggaaacacagacagacacagcatcaagaagaacctgatcggagcactgctgttcgacagcggagaaacagcagaagcaacaagactgaagagaacagcaagaagaagatacacaagaagaaagaacagaatctgctacctgcaggaaatcttcagcaacgaaatggcaaaggtcgacgacagcttcttccacagactggaagaaagcttcctggtcgaagaagacaagaagcacgaaagacacccgatcttcggaaacatcgtcgacgaagtcgcataccacgaaaagtacccgacaatctaccacctgagaaagaagctggtcgacagcacagacaaggcagacctgagactgatctacctggcactggcacacatgatcaagttcagaggacacttcctgatcgaaggagacctgaacccggacaacagcgacgtcgacaagctgttcatccagctggtccagacatacaaccagctgttcgaagaaaacccgatcaacgcaagcggagtcgacgcaaaggcaatcctgagcgcaagactgagcaagagcagaagactggaaaacctgatcgcacagctgccgggagaaaagaagaacggactgttcggaaacctgatcgcactgagcctgggactgacaccgaacttcaagagcaacttcgacctggcagaagacgcaaagctgcagctgagcaaggacacatacgacgacgacctggacaacctgctggcacagatcggagaccagtacgcagacctgttcctggcagcaaagaacctgagcgacgcaatcctgctgagcgacatcctgagagtcaacacagaaatcacaaaggcaccgctgagcgcaagcatgatcaagagatacgacgaacaccaccaggacctgacactgctgaaggcactggtcagacagcagctgccggaaaagtacaaggaaatcttcttcgaccagagcaagaacggatacgcaggatacatcgacggaggagcaagccaggaagaattctacaagttcatcaagccgatcctggaaaagatggacggaacagaagaactgctggtcaagctgaacagagaagacctgctgagaaagcagagaacattcgacaacggaagcatcccgcaccagatccacctgggagaactgcacgcaatcctgagaagacaggaagacttctacccgttcctgaaggacaacagagaaaagatcgaaaagatcctgacattcagaatcccgtactacgtcggaccgctggcaagaggaaacagcagattcgcatggatgacaagaaagagcgaagaaacaatcacaccgtggaacttcgaagaagtcgtcgacaagggagcaagcgcacagagcttcatcgaaagaatgacaaacttcgacaagaacctgccgaacgaaaaggtcctgccgaagcacagcctgctgtacgaatacttcacagtctacaacgaactgacaaaggtcaagtacgtcacagaaggaatgagaaagccggcattcctgagcggagaacagaagaaggcaatcgtcgacctgctgttcaagacaaacagaaaggtcacagtcaagcagctgaaggaagactacttcaagaagatcgaatgcttcgacagcgtcgaaatcagcggagtcgaagacagattcaacgcaagcctgggaacataccacgacctgctgaagatcatcaaggacaaggacttcctggacaacgaagaaaacgaagacatcctggaagacatcgtcctgacactgacactgttcgaagacagagaaatgatcgaagaaagactgaagacatacgcacacctgttcgacgacaaggtcatgaagcagctgaagagaagaagatacacaggatggggaagactgagcagaaagctgatcaacggaatcagagacaagcagagcggaaagacaatcctggacttcctgaagagcgacggattcgcaaacagaaacttcatgcagctgatccacgacgacagcctgacattcaaggaagacatccagaaggcacaggtcagcggacagggagacagcctgcacgaacacatcgcaaacctggcaggaagcccggcaatcaagaagggaatcctgcagacagtcaaggtcgtcgacgaactggtcaaggtcatgggaagacacaagccggaaaacatcgtcatcgaaatggcaagagaaaaccagacaacacagaagggacagaagaacagcagagaaagaatgaagagaatcgaagaaggaatcaaggaactgggaagccagatcctgaaggaacacccggtcgaaaacacacagctgcagaacgaaaagctgtacctgtactacctgcagaacggaagagacatgtacgtcgaccaggaactggacatcaacagactgagcgactacgacgtcgaccacatcgtcccgcagagcttcctgaaggacgacagcatcgacaacaaggtcctgacaagaagcgacaagaacagaggaaagagcgacaacgtcccgagcgaagaagtcgtcaagaagatgaagaactactggagacagctgctgaacgcaaagctgatcacacagagaaagttcgacaacctgacaaaggcagagagaggaggactgagcgaactggacaaggcaggattcatcaagagacagctggtcgaaacaagacagatcacaaagcacgtcgcacagatcctggacagcagaatgaacacaaagtacgacgaaaacgacaagctgatcagagaagtcaaggtcatcacactgaagagcaagctggtcagcgacttcagaaaggacttccagttctacaaggtcagagaaatcaacaactaccaccacgcacacgacgcatacctgaacgcagtcgtcggaacagcactgatcaagaagtacccgaagctggaaagcgaattcgtctacggagactacaaggtctacgacgtcagaaagatgatcgcaaagagcgaacaggaaatcggaaaggcaacagcaaagtacttcttctacagcaacatcatgaacttcttcaagacagaaatcacactggcaaacggagaaatcagaaagagaccgctgatcgaaacaaacggagaaacaggagaaatcgtctgggacaagggaagagacttcgcaacagtcagaaaggtcctgagcatgccgcaggtcaacatcgtcaagaagacagaagtccagacaggaggattcagcaaggaaagcatcctgccgaagagaaacagcgacaagctgatcgcaagaaagaaggactgggacccgaagaagtacggaggattcgacagcccgacagtcgcatacagcgtcctggtcgtcgcaaaggtcgaaaagggaaagagcaagaagctgaagagcgtcaaggaactgctgggaatcacaatcatggaaagaagcagcttcgaaaagaacccgatcgacttcctggaagcaaagggatacaaggaagtcaagaaggacctgatcatcaagctgccgaagtacagcctgttcgaactggaaaacggaagaaagagaatgctggcaagcgcaggagaactgcagaagggaaacgaactggcactgccgagcaagtacgtcaacttcctgtacctggcaagccactacgaaaagctgaagggaagcccggaagacaacgaacagaagcagctgttcgtcgaacagcacaagcactacctggacgaaatcatcgaacagatcagcgaattcagcaagagagtcatcctggcagacgcaaacctggacaaggtcctgagcgcatacaacaagcacagagacaagccgatcagagaacaggcagaaaacatcatccacctgttcacactgacaaacctgggagcaccggcagcattcaagtacttcgacacaacaatcgacagaaagagatacacaagcacaaaggaagtcctggacgcaacactgatccaccagagcatcacaggactgtacgaaacaagaatcgacctgagccagctgggaggagacggaggaggaagcccgaagaagaagagaaaggtctag

SEQ ID NO: 705 - RNA, 4501 nt, synthetic construct
  source 1..4501: mol_type = other RNA; note = Description of Artificial Sequence: Synthetic polynucleotide
gggtcccgcagtcggcgtccagcggctctgcttgttcgtgtgtgtgtcgttgcaggccttattcggatccgccaccatggacaagaagtacagcatcggactggacatcggaacaaacagcgtcggatgggcagtcatcacagacgaatacaaggtcccgagcaagaagttcaaggtcctgggaaacacagacagacacagcatcaagaagaacctgatcggagcactgctgttcgacagcggagaaacagcagaagcaacaagactgaagagaacagcaagaagaagatacacaagaagaaagaacagaatctgctacctgcaggaaatcttcagcaacgaaatggcaaaggtcgacgacagcttcttccacagactggaagaaagcttcctggtcgaagaagacaagaagcacgaaagacacccgatcttcggaaacatcgtcgacgaagtcgcataccacgaaaagtacccgacaatctaccacctgagaaagaagctggtcgacagcacagacaaggcagacctgagactgatctacctggcactggcacacatgatcaagttcagaggacacttcctgatcgaaggagacctgaacccggacaacagcgacgtcgacaagctgttcatccagctggtccagacatacaaccagctgttcgaagaaaacccgatcaacgcaagcggagtcgacgcaaaggcaatcctgagcgcaagactgagcaagagcagaagactggaaaacctgatcgcacagctgccgggagaaaagaagaacggactgttcggaaacctgatcgcactgagcctgggactgacaccgaacttcaagagcaacttcgacctggcagaagacgcaaagctgcagctgagcaaggacacatacgacgacgacctggacaacctgctggcacagatcggagaccagtacgcagacctgttcctggcagcaaagaacctgagcgacgcaatcctgctgagcgacatcctgagagtcaacacagaaatcacaaaggcaccgctgagcgcaagcatgatcaagagatacgacgaacaccaccaggacctgacactgctgaaggcactggtcagacagcagctgccggaaaagtacaaggaaatcttcttcgaccagagcaagaacggatacgcaggatacatcgacggaggagcaagccaggaagaattctacaagttcatcaagccgatcctggaaaagatggacggaacagaagaactgctggtcaagctgaacagagaagacctgctgagaaagcagagaacattcgacaacggaagcatcccgcaccagatccacctgggagaactgcacgcaatcctgagaagacaggaagacttctacccgttcctgaaggacaacagagaaaagatcgaaaagatcctgacattcagaatcccgtactacgtcggaccgctggcaagaggaaacagcagattcgcatggatgacaagaaagagcgaagaaacaatcacaccgtggaacttcgaagaagtcgtcgacaagggagcaagcgcacagagcttcatcgaaagaatgacaaacttcgacaagaacctgccgaacgaaaaggtcctgccgaagcacagcctgctgtacgaatacttcacagtctacaacgaactgacaaaggtcaagtacgtcacagaaggaatgagaaagccggcattcctgagcggagaacagaagaaggcaatcgtcgacctgctgttcaagacaaacagaaaggtcacagtcaagcagctgaaggaagactacttcaagaagatcgaatgcttcgacagcgtcgaaatcagcggagtcgaagacagattcaacgcaagcctgggaacataccacgacctgctgaagatcatcaaggacaaggacttcctggacaacgaagaaaacgaagacatcctggaagacatcgtcctgacactgacactgttcgaagacagagaaatgatcgaagaaagactgaagacatacgcacacctgttcgacgacaaggtcatgaagcagctgaagagaagaagatacacaggatggggaagactgagcagaaagctgatcaacggaatcagagacaagcagagcggaaagacaatcctggacttcctgaagagcgacggattcgcaaacagaaacttcatgcagctgatccacgacgacagcctgacattcaaggaagacatccagaaggcacaggtcagcggacagggagacagcctgcacgaacacatcgcaaacctggcaggaagcccggcaatcaagaagggaatcctgcagacagtcaaggtcgtcgacgaactggtcaaggtcatgggaagacacaagccggaaaacatcgtcatcgaaatggcaagagaaaaccagacaacacagaagggacagaagaacagcagagaaagaatgaagagaatcgaagaaggaatcaaggaactgggaagccagatcctgaaggaacacccggtcgaaaacacacagctgcagaacgaaaagctgtacctgtactacctgcagaacggaagagacatgtacgtcgaccaggaactggacatcaacagactgagcgactacgacgtcgaccacatcgtcccgcagagcttcctgaaggacgacagcatcgacaacaaggtcctgacaagaagcgacaagaacagaggaaagagcgacaacgtcccgagcgaagaagtcgtcaagaagatgaagaactactggagacagctgctgaacgcaaagctgatcacacagagaaagttcgacaacctgacaaaggcagagagaggaggactgagcgaactggacaaggcaggattcatcaagagacagctggtcgaaacaagacagatcacaaagcacgtcgcacagatcctggacagcagaatgaacacaaagtacgacgaaaacgacaagctgatcagagaagtcaaggtcatcacactgaagagcaagctggtcagcgacttcagaaaggacttccagttctacaaggtcagagaaatcaacaactaccaccacgcacacgacgcatacctgaacgcagtcgtcggaacagcactgatcaagaagtacccgaagctggaaagcgaattcgtctacggagactacaaggtctacgacgtcagaaagatgatcgcaaagagcgaacaggaaatcggaaaggcaacagcaaagtacttcttctacagcaacatcatgaacttcttcaagacagaaatcacactggcaaacggagaaatcagaaagagaccgctgatcgaaacaaacggagaaacaggagaaatcgtctgggacaagggaagagacttcgcaacagtcagaaaggtcctgagcatgccgcaggtcaacatcgtcaagaagacagaagtccagacaggaggattcagcaaggaaagcatcctgccgaagagaaacagcgacaagctgatcgcaagaaagaaggactgggacccgaagaagtacggaggattcgacagcccgacagtcgcatacagcgtcctggtcgtcgcaaaggtcgaaaagggaaagagcaagaagctgaagagcgtcaaggaactgctgggaatcacaatcatggaaagaagcagcttcgaaaagaacccgatcgacttcctggaagcaaagggatacaaggaagtcaagaaggacctgatcatcaagctgccgaagtacagcctgttcgaactggaaaacggaagaaagagaatgctggcaagcgcaggagaactgcagaagggaaacgaactggcactgccgagcaagtacgtcaacttcctgtacctggcaagccactacgaaaagctgaagggaagcccggaagacaacgaacagaagcagctgttcgtcgaacagcacaagcactacctggacgaaatcatcgaacagatcagcgaattcagcaagagagtcatcctggcagacgcaaacctggacaaggtcctgagcgcatacaacaagcacagagacaagccgatcagagaacaggcagaaaacatcatccacctgttcacactgacaaacctgggagcaccggcagcattcaagtacttcgacacaacaatcgacagaaagagatacacaagcacaaaggaagtcctggacgcaacactgatccaccagagcatcacaggactgtacgaaacaagaatcgacctgagccagctgggaggagacggaggaggaagcccgaagaagaagagaaaggtctagctagccatcacatttaaaagcatctcagcctaccatgagaataagagaaagaaaatgaagatcaatagcttattcatctctttttctttttcgttggtgtaaagccaacaccctgtctaaaaaacataaatttctttaatcattttgcctcttttctctgtgcttcaattaataaaaaatggaaagaacctcgagaaaaaaaaaaaaaaaaaaaaaaaaaaaaaaaaaaaaaaaaaaaaaaaaaaaaaaaaaaaaaaaaaaaaaaaaaaaaaaaaaaaaaaaaaa

SEQ ID NO: 706-1128 - skipped (423 entries)

SEQ ID NO: 1129 - RNA, 20 nt, synthetic construct
  source 1..20: mol_type = other RNA; note = Description of Artificial Sequence: Synthetic oligonucleotide
gagtccgagcagaagaagaa

SEQ ID NO: 1130 - RNA, 20 nt, synthetic construct
  source 1..20: mol_type = other RNA; note = Description of Artificial Sequence: Synthetic oligonucleotide
gaccccctccaccccgcctc

SEQ ID NO: 1131 - protein, 18 aa, synthetic construct
  source 1..18: note = Description of Artificial Sequence: Synthetic peptide
EGRGSLLTCGDVEENPGP

SEQ ID NO: 1132 - protein, 19 aa, synthetic construct
  source 1..19: note = Description of Artificial Sequence: Synthetic peptide
ATNFSLLKQAGDVEENPGP

SEQ ID NO: 1133 - protein, 20 aa, synthetic construct
  source 1..20: note = Description of Artificial Sequence: Synthetic peptide
QCTNYALLKLAGDVESNPGP

SEQ ID NO: 1134 - protein, 22 aa, synthetic construct
  source 1..22: note = Description of Artificial Sequence: Synthetic peptide
VKQTLNFDLLKLAGDVESNPGP

SEQ ID NO: 1135 - protein, 21 aa, synthetic construct
  source 1..21: note = Description of Artificial Sequence: Synthetic peptide
GSGEGRGSLLTCGDVEENPGP

SEQ ID NO: 1136 - protein, 22 aa, synthetic construct
  source 1..22: note = Description of Artificial Sequence: Synthetic peptide
GSGATNFSLLKQAGDVEENPGP

SEQ ID NO: 1137 - protein, 23 aa, synthetic construct
  source 1..23: note = Description of Artificial Sequence: Synthetic peptide
GSGQCTNYALLKLAGDVESNPGP

SEQ ID NO: 1138 - protein, 25 aa, synthetic construct
  source 1..25: note = Description of Artificial Sequence: Synthetic peptide
GSGVKQTLNFDLLKLAGDVESNPGP

What is claimed is:

1.-117. (canceled)

118. A single guide RNA (sgRNA) that comprises the sequence of SEQ ID NO: 40, wherein the sgRNA comprises one or more modified nucleotides.

119. The sgRNA of claim 118, wherein the sgRNA comprises the sequence of:
(SEQ ID NO: 72)
mU*mA*mA*AGCAUAGUGCAAUGGAUGUUUUAGAmGmCmUmAmGmAmAmA
mUmAmGmCAAGUUAAAAUAAGGCUAGUCCGUUAUCAmAmCmUmUmGmAmA
mAmAmAmGmUmGmGmCmAmCmCmGmAmGmUmCmGmGmUmGmCmU*mU*mU
*mU,
wherein “mA,” “mC,” “mU,” and “mG” represent nucleotides that have been substituted with 2′-O-methyl (2′-O-Me) and * indicates a phosphorothioate (PS) bond.

120. A method of inserting a nucleic acid encoding a heterologous polypeptide into an albumin locus of a cell or cell population in a subject, the method comprising administering to the subject:
i) the sgRNA of claim 118;
ii) a Cas9 nuclease; and
iii) a construct comprising the nucleic acid encoding the heterologous polypeptide, thereby inserting the nucleic acid encoding the heterologous polypeptide into the albumin locus of the cell or cell population in the subject.

121. The method of claim 120, wherein the sgRNA comprises the sequence of:
(SEQ ID NO: 72)
mU*mA*mA*AGCAUAGUGCAAUGGAUGUUUUAGAmGmCmUmAmGmAmAmA
mUmAmGmCAAGUUAAAAUAAGGCUAGUCCGUUAUCAmAmCmUmUmGmAmA
mAmAmAmGmUmGmGmCmAmCmCmGmAmGmUmCmGmGmUmGmCmU*mU*mU
*mU,
wherein “mA,” “mC,” “mU,” and “mG” represent nucleotides that have been substituted with 2′-O-methyl (2′-O-Me) and * indicates a phosphorothioate (PS) bond.

122. The method of claim 120, wherein the Cas9 nuclease is administered as an mRNA encoding a Cas9 nuclease.

123. The method of claim 120, wherein the Cas9 nuclease is an S. pyogenes Cas9 nuclease.

124. The method of claim 120, wherein the construct comprises a polyadenylation signal sequence.

125. The method of claim 120, wherein the construct comprises a splice acceptor site.

126. The method of claim 120, wherein the construct does not comprise a homology arm.

127. The method of claim 120, wherein the sgRNA is administered in a lipid nanoparticle.

128. The method of claim 120, wherein the Cas9 nuclease is administered in a lipid nanoparticle.

129. The method of claim 120, wherein the construct comprising the nucleic acid encoding the heterologous polypeptide is administered in a viral vector.

130. The method of claim 129, wherein the viral vector is an adeno-associated viral (AAV) vector.

131. The method of claim 120, wherein the sgRNA, the Cas9 nuclease, and the construct comprising the nucleic acid encoding the heterologous polypeptide are administered simultaneously.

132. The method of claim 120, wherein the cell or population of cells is a liver cell or a population of liver cells.

133. The method of claim 120, wherein the sgRNA mediates target-specific cutting by the Cas9 nuclease, resulting in insertion of the nucleic acid encoding the heterologous polypeptide within intron 1 of the albumin gene.

134. A single gRNA (sgRNA) that comprises the sequence of SEQ ID NO: 34, wherein the sgRNA comprises one or more modified nucleotides.

135. The sgRNA of claim 134, wherein the sgRNA comprises the sequence of:
(SEQ ID NO: 66)
mG*mA*mG*CAACCUCACUCUUGUCUGUUUUAGAmGmCmUmAmGmAmAmA
mUmAmGmCAAGUUAAAAUAAGGCUAGUCCGUUAUCAmAmCmUmUmGmAmA
mAmAmAmGmUmGmGmCmAmCmCmGmAmGmUmCmGmGmUmGmCmU*mU*mU
*mU,
wherein “mA,” “mC,” “mU,” and “mG” represent nucleotides that have been substituted with 2′-O-methyl (2′-O-Me) and * indicates a phosphorothioate (PS) bond.

136. A method of inserting a nucleic acid encoding a heterologous polypeptide into an albumin locus of a cell or cell population in a subject, the method comprising administering to the subject:
i) a sgRNA of claim 134;
ii) a Cas9 nuclease; and
iii) a construct comprising the nucleic acid encoding the heterologous polypeptide,
thereby inserting the nucleic acid encoding the heterologous polypeptide into the albumin locus of the cell or cell population in the subject.

137. The method of claim 136, wherein the sgRNA comprises the sequence of:
(SEQ ID NO: 66)
mG*mA*mG*CAACCUCACUCUUGUCUGUUUUAGAmGmCmUmAmGmAmAmA
mUmAmGmCAAGUUAAAAUAAGGCUAGUCCGUUAUCAmAmCmUmUmGmAmA
mAmAmAmGmUmGmGmCmAmCmCmGmAmGmUmCmGmGmUmGmCmU*mU*mU
*mU,
wherein “mA,” “mC,” “mU,” and “mG” represent nucleotides that have been substituted with 2′-O-methyl (2′-O-Me) and * indicates a phosphorothioate (PS) bond.
